(19) United States
(12) Patent Application Publication
(10) Pub. No.: US 2014/0154253 A1
(43) Pub. Date: Jun. 5, 2014

(54) Bispecific Asymmetric Heterodimers Comprising Anti-CD3 Constructs

(71) Applicant: Zymeworks Inc., Vancouver (CA)

(72) Inventors: Gordon Yiu Kon NG, Vancouver (CA); Surjit Bhimarao DIXIT, Richmond (CA); Thomas SPRETER VON KREUDENSTEIN, Vancouver (CA)

(73) Assignee: Zymeworks Inc., Vancouver (CA)

(21) Appl. No.: 13/941,449

(22) Filed: Jul. 13, 2013

Related U.S. Application Data
(60) Provisional application No. 61/845,948, filed on Jul. 12, 2013.
(60) Provisional application No. 61/671,640, filed on Jul. 13, 2012.

(51) Int. Cl. C07K 16/28

(52) U.S. Cl. CPC C07K 16/2809
USPC 424/136.1; 530/387.3; 435/320.1; 435/69.6

(57) ABSTRACT

Disclosed herein are isolated multi-specific heteromultimer constructs that bind to CD3 expressed on T-cells and to an antigen expressed on B-cells. The multi-specific heteromultimer constructs are capable of bridging T- and B-cells and mediating killing of B-cells. The multi-specific heteromultimer constructs are based on a heterodimeric Fc scaffold or on a segmented albumin scaffold. Also disclosed herein are multi-specific heteromultimer constructs that bind to HER2 and HER3.

### CROSS-REFERENCE TO RELATED APPLICATIONS

[0001] This application claims the benefit of U.S. Application Ser. No. 61/671,640, filed Jul. 13, 2012; and U.S. application Ser. No. ______, filed Jul. 13, 2013, which are hereby incorporated by reference in their entirety.

### FIELD OF THE INVENTION

[0002] The field of the invention is the rational design of multispecific scaffolds comprising a CD3 binding domain for custom development of biotherapeutics.

### BACKGROUND OF THE INVENTION

[0003] In the realm of therapeutic proteins, antibodies with their multivalent target binding features are excellent scaffolds for the design of drug candidates. Advancing these features further, designed bispecific antibodies and other fused multispecific therapeutics exhibit dual or multiple target specificities and an opportunity to create drugs with novel modes of action. The development of such multivalent and multispecific therapeutic proteins with favorable pharmacokinetics and functional activity has been a challenge.

[0004] The immune system of both humans and animals include two principal classes of lymphocytes: the thymus derived cells (T cells), and the bone marrow derived cells (B cells). T cells exhibit immunological specificity and are directly involved in cell-mediated immune responses (such as graft rejection). T cells act against or in response to a variety of foreign structures (antigens). In many instances these foreign antigens are expressed on host cells as a result of infection. However, foreign antigens can also come from the host having been altered by neoplasia or infection.

[0005] T cell activation is a complex phenomenon that depends on the participation of a variety of cell surface molecules expressed on the responding T cell population. For example, the antigen-specific T cell receptor (TcR) is composed of a disulfide-linked heterodimer, containing two clonally distributed, integral membrane glycoprotein chains, alpha and beta (α and β), or gamma and delta (γ and δ), non-covalently associated with a complex of low molecular weight invariant proteins, commonly designated as CD3.

### SUMMARY OF THE INVENTION

[0006] Provided herein are multispecific heteromultimers comprising a CD3 binding domain. In an embodiment is provided a bispecific asymmetric heterodimer comprising anti-CD3 constructs.

[0007] Provided herein are isolated multispecific heteromultimer constructs comprising: a first polypeptide construct comprising a first heavy chain polypeptide and a CD3 binding polypeptide construct that binds to a CD3 complex on at least one CD3 expressing cell; a second polypeptide construct comprising a second heavy chain polypeptide which is different from said first heavy chain polypeptide, and an antigen binding polypeptide construct that binds to a target antigen on at least one B cell; wherein: at least one of said CD3 binding polypeptide construct and said antigen binding polypeptide construct comprises a single chain Fv region; wherein said multispecific heteromultimer construct simultaneously engages said at least one B cell and said at least one CD3 expressing cell such that the CD3 expressing cell is activated, thereby inducing killing of the B cell; and said first and second heavy chain polypeptides form a heterodimeric Fc region comprising a variant immunoglobulin CH3 region comprising at least one amino acid mutation that promotes the formation of said heterodimeric Fc with stability at least comparable to a native homodimeric Fc, and with purity such that when said multispecific heteromultimer construct is coexpressed from a stable mammalian cell in an expression product, said expression product comprises at least about 70% of said multispecific heteromultimer, and less than 10% monomers or homodimers of said first or second polypeptide constructs. In certain embodiments, said stable mammalian cell is transfected at least a first DNA sequence encoding said first polypeptide construct and at least a second DNA sequence encoding said second polypeptide construct in a pre-determined ratio of 1:1. In certain embodiments, the first or second polypeptide construct is devoid of at least one of immunoglobulin light chain, and immunoglobulin first constant (CH1) region.

[0008] In certain embodiments are the isolated heteromultimer constructs described herein, wherein the heterodimer Fc region comprises a variant CH2 domain or hinge comprising amino acid modifications that prevents functionally effective binding to all the Fcgamma receptors. In some embodiments is provided the isolated multispecific heteromultimer described herein, wherein wherein said variant CH2 domain or hinge comprising amino acid modification also prevents functionally effective binding to complement proteins (C1q complex). In an embodiment is the isolated multispecific heteromultimer described herein, wherein the heterodimer Fc region comprises a variant CH2 domain or hinge comprising amino acid modifications that enhance binding to the FcγRIIb receptor.

[0009] In an embodiment is provided an isolated multispecific heteromultimer construct comprising: a first polypeptide construct comprising a first heavy chain polypeptide and a CD3 binding polypeptide construct that binds to a CD3 complex on at least one CD3 expressing cell; a second polypeptide construct comprising a second heavy chain polypeptide which is different from said first heavy chain polypeptide, and an antigen binding polypeptide construct that binds to a target antigen on at least one B cell; wherein: at least one of said CD3 binding polypeptide construct and said antigen binding polypeptide construct optionally comprises a single chain Fv region; said first and second heavy chain polypeptides form a heterodimeric Fc region comprising a variant immunoglobulin CH3 region comprising at least one amino acid mutation that promotes the formation of said heterodimeric Fc, wherein: said heterodimeric Fc is formed with stability at least comparable to a native homodimeric Fc, and said heterodimeric Fc is formed with purity such that when said multispecific heteromultimer construct is coexpressed from a mammalian cell in an expression product, said expression product comprises greater than 70% of said multispecific heteromultimer, and less than 10% monomers or homodimers of said first or second polypeptide constructs; and said multispecific heteromultimer construct binds said at least one B cell with a valency greater than one, and said multispecific heteromultimer simultaneously engages said at least one B cell and said at least one CD3 expressing cell such that the CD3 expressing cell is activated, thereby inducing killing of the B cell. In certain embodiments, said multispecific heteromultimer construct binds said at least one B cell with a valency of two.

[0010] Provided herein is an isolated multispecific heteromultimer construct comprising: a first polypeptide construct comprising a first heavy chain polypeptide and a CD3 binding polypeptide construct that binds to a CD3 complex on at least one CD3 expressing cell; a second polypeptide construct comprising a second heavy chain polypeptide which is different from said first heavy chain polypeptide, and a steric modulator construct which exhibits negligible receptor binding; wherein: said multispecific heteromultimer construct simultaneously engages at least one B cell and said at least one CD3 expressing cell such that the CD3 expressing cell is activated, thereby inducing killing of the B cell; and said first and second heavy chain polypeptides form a heterodimeric Fc region comprising a variant immunoglobulin CH3 region comprising at least one amino acid mutation that promotes the formation of said heterodimeric Fc, wherein: said heterodimeric Fc is formed with stability at least comparable to a native homodimeric Fc, and said heterodimeric Fc is formed with purity such that when said multispecific heteromultimer construct is coexpressed from a stable mammalian cell in an expression product, said expression product comprises at least about 75% of said multispecific heteromultimer, and less than 10% monomers or homodimers of said first or second polypeptide constructs.

[0011] Provided is an isolated multispecific heteromultimer construct comprising: a first polypeptide construct comprising a first heavy chain polypeptide and a CD3 binding polypeptide construct that binds to a CD3 complex on at least one CD3 expressing cell; a second polypeptide construct comprising a second heavy chain polypeptide which is different from said first heavy chain polypeptide, and wherein said second polypeptide construct does not comprise an antigen binding polypeptide construct; wherein: said multispecific heteromultimer construct simultaneously engages at least one B cell and said at least one CD3 expressing cell such that the CD3 expressing cell is activated, thereby inducing killing of the B cell; and said first and second heavy chain polypeptides form a heterodimeric Fc region comprising a variant immunoglobulin CH3 region comprising at least one amino acid mutation that promotes the formation of said heterodimeric Fc, wherein: said heterodimeric Fc is formed with stability at least comparable to a native homodimeric Fc, and said heterodimeric Fc is formed with purity such that when said multispecific heteromultimer construct is coexpressed from a stable mammalian cell in an expression product, said expression product comprises at least about 75% of said multispecific heteromultimer, and less than 10% monomers or homodimers of said first or second polypeptide constructs.

[0012] In certain embodiments is the isolated multispecific heteromultimer described herein wherein the heterodimer Fc region comprises a variant CH2 domain comprising amino acid modifications to promote selective binding of a Fcgamma receptor. In some embodiments, the variant CH2 domain selectively binds FcgammaIIb receptor greater than to wild-type CH2 domain. In certain embodiments, the variant CH2 domain selectively binds atleast one of FcgammaIIIa and FcgammaIIa receptor greater than a wild-type CH2 domain.

[0013] In certain embodiments is an isolated multispecific heteromultimer construct described herein, wherein the variant CH3 domain has a melting temperature (Tm) of about 73° C. or greater. In some embodiments, the heterodimer Fc region is formed with a purity greater than about 90%. In certain embodiments, the heterodimer Fc region is formed with a purity of about 95% or greater and the Tm is at least about 75° C. In some further embodiments, the heterodimer Fc region is formed with a purity of at least about 90% and the Tm is about 75° C. In an embodiment, the variant CH3 sequence of the first heavy chain polypeptide comprises the amino acid modifications L351Y, F405A, and Y407V, and the variant CH3 sequence of the second transporter polypeptide comprises the amino acid modifications T366L, K392M, and T394W. In another embodiment, the variant CH3 sequence of the first heavy chain polypeptide comprises the amino acid modifications L351Y, F405A, and Y407V, and the variant CH3 sequence of the second heavy chain polypeptide comprises the amino acid modifications T366L, K392L, and T394W. In a further embodiment, the variant CH3 sequence of the first heavy chain polypeptide comprises the amino acid modifications T350V, L351Y, F405A, and Y407V, and the variant CH3 sequence of the second heavy chain polypeptide comprises the amino acid modifications T350V, T366L, K392M, and T394W. In some embodiments, the variant CH3 sequence of the first heavy chain polypeptide comprises the amino acid modifications T350V, L351Y, F405A, and Y407V, and the variant CH3 sequence of the second heavy chain polypeptide comprises the amino acid modifications T350V, T366L, K392L, and T394W. In yet another embodiment, the variant CH3 sequence of the first heavy chain polypeptide comprises the amino acid modifications T366L, N390R, K392R, and T394W, and the variant CH3 sequence of the second heavy chain polypeptide comprises the amino acid modifications L351Y, S400E, F405A, and Y407V. In some embodiments, the variant CH3 sequence of the first heavy chain polypeptide comprises the amino acid modifications T350V, T366L, N390R, K392R, and T394W, and the variant CH3 sequence of the second heavy chain polypeptide comprises the amino acid modifications T350V, L351Y, S400E, F405A, and Y407V.

[0014] In certain embodiments is provided an isolated multispecific heteromultimer described herein, wherein the heterodimer Fc is glycosylated. In some embodiments is provided an isolated multispecific heteromultimer described herein, wherein the heterodimer Fc is a fucosylated. In another embodiment is provided an isolated multispecific heteromultimer described herein, wherein the heterodimer Fc is a glycosylated.

[0015] In some embodiments is the isolated multispecific heteromultimer described herein wherein the antigen binding polypeptide construct that binds to a target antigen on at least one B cell comprises at least one target antigen binding domain derived from an antibody, a fibronectin, an affibody, anticalin, cysteine knot protein, DARPin, avimer, Kunitz domain or variant or derivative thereof. In an embodiment is the isolated multispecific heteromultimer described herein, wherein said antibody is a heavy chain antibody devoid of light chains. In further embodiments is the isolated multispecific heteromultimer described herein, wherein said antigen binding polypeptide construct comprises at least one CD19 binding domain. In certain embodiments is the isolated multispecific heteromultimer described herein, wherein said antigen binding polypeptide construct comprises at least one CD20 binding domain.

[0016] Provided herein is an isolated multispecific heteromultimer construct comprising: a first polypeptide construct comprising a first transporter polypeptide fused to at least one CD3 binding polypeptide construct that binds to a CD3 complex on at least one CD3 expressing cell; a second polypeptide construct comprising a second transporter polypeptide which is different from said first transporter polypeptide, fused to at least one antigen binding polypeptide construct that binds to a target antigen on at least one B cell; wherein said first and second transporter polypeptides are derived from a protein by segmentation of said protein, each transporter polypeptide comprising an amino acid sequence with at least 90% identity to a segment of said protein, and wherein said transporter polypeptides self-assemble to form a quasi-native structure of said monomeric protein.

[0017] In certain embodiments, said transporter polypeptides are not derived from an antibody. In certain embodiment, each transporter polypeptide is an albumin derivative. In some embodiments, said albumin is human serum albumin. In some embodiments, least one transporter polypeptide is an allo-albumin derivative. In certain embodiments, each transporter polypeptide is derived from a different alloalbumin.

[0018] Provided herein are isolated multispecific heteromultimer constructs comprising: a first polypeptide construct comprising a first transporter polypeptide fused to at least one CD3 binding polypeptide construct that binds to a CD3 complex on at least one CD3 expressing cell; a second polypeptide construct comprising a second transporter polypeptide which is different from said first transporter polypeptide, fused to at least one antigen binding polypeptide construct that binds to a target antigen on at least one B cell; wherein said first and second transporter polypeptides are obtained by segmentation of albumin, and each transporter polypeptide comprising an amino acid sequence with at least 90% identity to a segment of albumin such that said transporter polypeptides self-assemble to form quasi-native albumin, and wherein said first cargo polypeptide does not have any binding domain present in said second cargo polypeptide.

[0019] In certain embodiments is provided a heteromultimer described herein, wherein said multispecific heteromultimer construct simultaneously engages said at least one B cell and said at least one CD3 expressing cell such that the CD3 expressing cell is activated, thereby inducing killing of the B cell. In some embodiments, said antigen binding polypeptide construct that binds to a target antigen on at least one B cell comprises at least one target antigen binding domain derived from an antibody, a fibronectin, an affibody, anticalin, cysteine knot protein, DARPin, avimer, Kunitz domain or variant or derivative thereof. In certain embodiments, the antigen binding polypeptide construct comprises at least one CD19 binding domain.

[0020] In certain embodiments is provided a multispecific heteromultimer described herein, wherein said antigen binding polypeptide construct comprises at least one CD20 binding domain.

[0021] In certain embodiments is provided a multispecific heteromultimer described herein, wherein the at least one CD3 binding polypeptide construct comprises at least one CD3 binding domain derived from a CD3 specific antibody, a nanobody, fibronectin, affibody, anticalin, cysteine knot protein, DARPin, avimer, Kunitz domain or variant or derivative thereof. In some embodiments, the at least one CD3 binding domain comprises at least one amino acid modification that reduces immunogenicity as compared to a corresponding CD3 binding domain not comprising said modification. In some embodiments is the isolated multispecific heteromultimer described herein, wherein said at least one CD3 binding domain comprises at least one amino acid modification that increases its stability as measured by Tₘ, as compared to a corresponding CD3 binding domain not comprising said modification. In some embodiments, the at least one CD3 binding polypeptide construct comprises at least one CD3 binding domain derived from a CD3 specific antibody is a heavy chain antibody devoid of light chains. In certain embodiments, the at least one CD3 binding polypeptide construct comprises at least one CD3 binding domain derived from a non-antibody protein scaffold domain.

[0022] In an embodiment is provided the isolated heteromutlimer construct described herein, wherein at least one of said first and second polypeptide constructs further comprises a single-chain Fv polypeptide. In certain embodiments, is provided the isolated heteromutlimer construct described herein, wherein at least one of said first and second polypeptide constructs further comprises a single-chain Fab polypeptide.

[0023] In some embodiments is the isolated heteromutlimer construct described herein, where in the CD3 expressing cell is a T-cell. In certain embodiments is the isolated heteromultimer described herein, wherein said heteromultimer binds to the T-cell with sufficient affinity and decorates the T cell at sufficient capacity that induces the T-cell to display B cell killing activity when the T cell and the B cell are bridged.

[0024] Provided is an isolated heteromutlimer construct described herein, where in the CD3 expressing cell is a human cell. In certain embodiments, the CD3 expressing cell is a non-human, mammalian cell. In some embodiments, the mammalian cell is a primate cell. In certain embodiments, the primate is a monkey. In some embodiments, the at least one CD3 binding polypeptide construct binds to CD3 constructs across multiple species. In certain embodiments the CD3 binding polypeptide binds to CD3 constructs across multiple species which include at least one or more of human, rat, mouse and monkey.

[0025] Provided is an isolated heteromutlimer construct described herein wherein the at least one B cell is associated with a disease. In certain embodiments, the disease is a cancer selected from a carcinoma, a sarcoma, leukaemia, lymphoma and glioma. In some embodiments, the cancer is at least one of squamous cell carcinoma, adenocarcinoma, transition cell carcinoma, osteosarcoma and soft tissue sarcoma. In an embodiment, the at least one B cell is an autoimmune reactive cell that is a lymphoid or myeloid cell.

[0026] Provided is an isolated heteromutlimer construct described herein wherein said heteromultimer further comprises at least one binding domain that binds at least one of: EpCAM, EGFR, IGFR, HER-2 neu, HER-3, HER-4, PSMA, CEA, MUC-1 (mucin), MUC2, MUC3, MUC4, MUC5, MUC7, CCR4, CCR5, CD19, CD20, CD33, CD30, ganglioside GD3, 9-O-Acetyl-GD3, GM2, Poly SA, GD2, Carboanhydrase IX (MN/CA IX), CD44v6, Sonic Hedgehog (Shh), Wue-1, Plasma Cell Antigen, (membrane-bound), Melanoma Chondroitin Sulfate Proteoglycan (MCSP), CCR8, TNF-alpha precursor, STEAP, mesothelin, A33 Antigen, Prostate Stem Cell Antigen (PSCA), Ly-6; desmoglein 4, E-cadherin neoepitope, Fetal Acetylcholine Receptor, CD25, CA19-9 marker, CA-125 marker and Muellerian Inhibitory Substance (MIS) Receptor type II, sTn (sialylated Tn antigen; TAG-72), FAP (fibroblast activation antigen), endosialin, LG, SAS, EPHA4 CD63, CD3 BsAb immunocytokines TNF, IFNγ, IL-2, and TRAIL.

[0027] Provided is an isolated heteromutlimer construct described herein wherein said heteromultimer optionally comprises at least one linker. In some embodiments, said at least one linker is a polypeptide comprising from about 1 to about 100 amino acids.

[0028] Provided is a set of expression vectors for expressing a multispecific heteromultimer described herein, comprising at least a first DNA sequence encoding said first polypeptide construct and at least a second DNA sequence encoding said second polypeptide construct.

[0029] Provided is a method of producing an expression product containing a multispecific heteromultimer described herein, in stable mammalian cells, the method comprising: transfecting at least one mammalian cell with: at least a first DNA sequence encoding said first polypeptide construct and at least a second DNA sequence encoding said second polypeptide construct, such that said at least one first DNA sequence, said at least one second DNA sequence are transfected in said at least one mammalian cell in a pre-determined ratio to generate stable mammalian cells; culturing said stable mammalian cells to produce said expression product comprising said multispecific heteromultimer. In some embodiments is the method of producing an expressin product containing a multispecific heteromultimer construct described herein, wherein said predetermined ratio of the at least one first DNA sequence: at least one second DNA sequence is about 1:1. In some embodiments, said mammalian cell is selected from the group consisting of a VERO, HeLa, HEK, NS0, Chinese Hamster Ovary (CHO), W138, BHK, COS-7, Caco-2 and MDCK cell, and subclasses and variants thereof.

[0030] Provided is a pharmaceutical composition comprising a multispecific heteromultimer described herein, and a suitable excipient. Also provided is a process for the production of said pharmaceutical composition, said process comprising: culturing a host cell under conditions allowing the expression of a heteromultimer as defined herein; recovering the produced heteromultimer from the culture; and producing the pharmaceutical composition.

[0031] Provided is a method for the prevention, treatment or amelioration of at least one of: a proliferative disease, a minimal residual cancer, a tumorous disease, an inflammatory disease, an immunological disorder, an autoimmune disease, an infectious disease, viral disease, allergic reactions, parasitic reactions, graft-versus-host diseases or host-versus-graft diseases or cell malignancies, said method comprising administering to a subject in need of such a prevention, treatment or amelioration a pharmaceutical composition described herein. Provided is a method of treating cancer in a mammal in need thereof, comprising administering to the mammal a composition comprising an effective amount of the pharmaceutical composition described herein, optionally in combination with other pharmaceutically active molecules. In certain embodiments said cancer is a solid tumor. In some other embodiments, said solid tumor is one or more of sarcoma, carcinoma, and lymphoma. In certain other embodiments, the cancer is a hematological cancer. In a further embodiment, the cancer is one or more of B-cell lymphoma, non-Hodgkin's lymphoma, and leukemia.

[0032] Provided is a method of treating cancer cells comprising providing to said cell a composition comprising a heteromultimer described herein. In certain embodiments, said heteromultimer is provided in conjugation with another therapeutic agent.

[0033] Provided is a method of treating a cancer non-responsive to at least one of a CD19 lytic antibody, a CD20 lytic antibody and blinatumomab, in a mammal in need thereof, comprising administering to the mammal a composition comprising an effective amount of the pharmaceutical composition described herein.

[0034] Provided is a method of treating a cancer cell regressive after treatment with blinatumomab, comprising providing to said cancer cell a composition comprising an effective amount of the pharmaceutical composition described herein.

[0035] Provided is a method of treating an individual suffering from a disease characterized by expression of B cells, said method comprising providing to said individual an effective amount of a composition comprising an effective amount of the pharmaceutical composition described herein. In certain embodiments, said disease is not responsive to treatment with at least one of an anti-CD19 antibody and an anti-CD20 antibody.

[0036] Provided is a method of treating an autoimmune condition in a mammal in need thereof, comprising administering to said mammal a composition comprising an effective amount of the pharmaceutical composition provided herein. In certain embodiments, said autoimmune condition is one or more of multiple sclerosis, rheumatoid arthritis, lupus erytematosus, psoriatic arthritis, psoriasis, vasculitis, uveitis, Crohn's disease, and type 1 diabetes.

[0037] Provided is a method of treating an inflammatory condition in a mammal in need thereof, comprising administering to said mammal a composition comprising an effective amount of the pharmaceutical composition comprising an heteromultimer provided herein.

[0038] Provided is a kit comprising a heteromultimer as defined herein, and instructions for use thereof.

[0039] Provided herein is a heteromultimer construct comprising: a first monomer comprising a first transporter polypeptide fused to a first cargo polypeptide that comprises at least one HER2 binding domain; a second monomer comprising a second transporter polypeptide which is different from said first transporter polypeptide, fused to a second cargo polypeptide that comprises at least one HER3 binding domain; wherein said first cargo polypeptide does not have any binding domain present in said second cargo polypeptide; wherein said first and second transporter polypeptide form a heterodimeric Fc region comprising a variant immunoglobulin CH3 region comprising at least one amino acid mutation that promotes the formation of said heterodimer with stability comparable to a native homodimeric Fc.

[0040] Provided herein is a heteromultimer construct comprising: a first monomer comprising a first transporter polypeptide fused to a first cargo polypeptide that comprises at least one HER2 binding domain; a second monomer comprising a second transporter polypeptide which is different from said first transporter polypeptide, fused to a second cargo polypeptide polypeptide that comprises at least one HER3 binding domain; wherein said first and second transporter polypeptides are obtained by segmentation of albumin such that said transporter polypeptides self-assemble to form quasi-native albumin.

[0041] Provided herein is a pharmaceutical composition comprising an insolated multispecific heteromultimer as defined herein, and a suitable excipient. Also provided is a process for the production of such a pharmaceutical composition, said process comprising: culturing a host cell under conditions allowing the expression of a heteromultimer as defined herein; recovering the produced heteromultimer from the culture; and producing the pharmaceutical composition.

[0042] Provided herein are host cells comprising nucleic acid encoding a heteromultimer described herein. In certain embodiments, the nucleic acid encoding the first monomeric protein and the nucleic acid encoding the second monomeric protein are present in a single vector. In certain embodiments, the nucleic acid encoding the first monomeric protein and the nucleic acid encoding the second monomeric protein are present in separate vectors.

[0043] Also provided is a kit comprising a heteromultimer as defined herein, and instructions for use thereof.

### BRIEF DESCRIPTION OF THE FIGURES

[0044] FIG. 1A-B: FIG. 1A depicts exemplary schematic representation of heteromultimer constructs provided herein. For instance the Immunoglobulin based Anti-CD3×CD19 constructs demonstrate different aspects of the heteromultimers for instance the cartoon shows the first and second polypeptide constructs wherein the first polypeptide construct comprises a CH3 binding construct (black) and the second polypeptide construct comprises an antigen binding construct (blue). In some embodiments, the antigen binding construct is absent or replaced by a steric modulating construct. Also shown is the Fc heteromultimer formed by the variant CH3 regions of the first and second polypeptide constructs. FIG. 1B shows the ability of a heteromultimer construct described herein (v873) and a construct that does not comprise a heteromultimer Fc (blinatumomab CD19-CD3 BiTE (v891, MT-103)) to bridge Jurkat CD3 T cells (Top left quadrant) with Raji CD19 B cells (bottom right quadrant) by FACS

[0045] FIG. 2 demonstrates that a heteromultimer described herein (v873) is able to selectively bind and bridge to CD3-expressing Jurkat T cells (lower right panel) and to CD19-expressing Raji B cells (upper right panel). FIG. 2 also demonstrates that the one-armed anti-CD3 antibody specifically binds to Jurkat T cells (lower middle panels) and does not cross-react to CD19 expressing B cells, (upper middle panels) and that the one-armed anti-CD19 antibody specifically binds to Raji B cells (upper left panel) and does not cross-react to Jurkat T cells (lower left panel).

[0046] FIG. 3A-3B: FIG. 3A depict the ability of a heteromultimer described herein (v873) to redirect IL-2 activated PBMC to kill target Raji B cells from 3 donors. FIG. 3B demonstrates that a heteromultimer described herein is able to mediate higher redirected T-cell cytotoxicity than a construct lacking the heterodimeric Fc in one of the donors.

[0047] FIG. 4 shows that heteromultimers described herein are able to bind to CD3-expressing Jurkat T-cells and to CD19-expressing Raji B-cells.

[0048] FIG. 5A-5B: FIG. 5A indicates that at the concentration tested, v1093, which is a heteromultimer described herein, was able to bridge 31% of total cells, and v873 another heteromultimer construct described herein was able to bridge 25% of total cells. FIG. 5B demonstrates that v1093 is able to bridge Jurkat T cells and Raji B cells to a greater extent than v221 and similar to v891 and v873.

[0049] FIG. 6 shows antibody therapeutics that can be provided along with a heteromultimer described herein for treatment of certain indications.

[0050] FIG. 7 shows an SDS-PAGE demonstrating that examplary heteromultimer constructs described herein are expressed transiently in CHO3E7 cells with a cell viability of >80%.

[0051] FIG. 8 shows that a heteromultimer described herein (v873) induces are higher % cytotoxicity to target B cells when compared to negative control human IgG1 (G1) when comparing across individual donors.

[0052] FIG. 9A-9B: FIG. 9A shows that human IgG (hIgG) does not bind to Jurkat T-cells and has low level binding to Raji B-cells. FIG. 9A also shows that anti-CD19 one arm constructs bind selectively to the Raji B-cells and does not cross-react to Jurkat T cells. FIG. 9B demonstrates FACS assay shows that v873-a heteromultimer described herein, binds selectively to Jurkat T-cells and to Raji B-cells.

[0053] FIG. 10 shows that v873-a heteromultimer described herein does not bind to the K562 cell line, which does not express CD19 or CD3.

[0054] FIG. 11 shows that v873-a heteromultimer described herein does not bind to mouse lymphoid cells which does not express CD19 or CD3.

[0055] FIG. 12.A-B: FIG. 12 A and FIG. 12B show FACS binding curves of heteromultimer constructs described herein (v873, v875) and the construct lacking a heterodimeric Fc (v891), to CD3 expressing HPB-ALL and CD3 expressing Jurkat T cells, and to CD19 expressing Raji B cells.

[0056] FIG. 13A-B: FIG. 13A illustrates the FACS binding curves for heteromultimer constructs v875, v1379, v1380, v1381, and control v891 binding to CD19 expressing Raji cells tested in 0.1 to 300 nM range. FIG. 13B illustrates the FACS binding curve for heteromultimer constructs v875, v1379, v1380, binding to HBP-ALL T cells tested in 0.1 to 300 nM range.

[0057] FIG. 14 indicates that heteomultimer constructs described herein (v875 and v891) facilitate comparable bridging between Raji B-cells and Jurkat T-cells. Use of the control human IgG resulted in 2.5% bridging between Raji and Jurkat cells, while v875 facilitated bridging of 22.9% of total cells, and v891 facilitated bridging of 14.5% of total cells.

[0058] FIG. 15A-15B: FIG. 15A shows the amount of bridging using a 1:1 ratio of T-cells to B-cells, with heteromultimer concentrations ranging from 0.3 nM to 3 nM. FIG. 15B shows the amount of bridging using a 15:1 ratio of T-cells to B-cells, with heteromultimer concentrations ranging from 0.3 nM to 3 nM. Both E:T ratios (1:1 and 15:1) tested with v875 resulted in similar total T cell-B cell bridging when expressed as fold over background.

[0059] FIG. 16A-16E: FIG. 16A depicts the ability of v875, v1379 and v1380 to mediate antibody dependent B cell cytoxicity by redirected CD4+ and CD8+ T cell towards Raji B cells. FIG. 16 B-16E depict representations of the data in FIG. 16A normalized to human IgG, for v875 (FIG. 16B and FIG. 16C), and v1379 and v1380 (FIG. 16D and FIG. 16E), and include % cytotoxicity indicated at each test antibody concentration.

[0060] FIG. 17A-17B: FIG. 17A illustrates that Fc blocking of IL-2 activated PBMC results in a minor (v875) or no (v873) reduction in the % cytotoxicity of target Raji B cells. FIG. 17B illustrates that Fc blocking of resting PBMC results in a reduction in the % cytotoxicity of target Raji B cells for v875 and v873.

[0061] FIG. 18A-18B: FIG. 18A illustrates that Fc blocking of IL-2 activated PBMC results in a reduction in the % cytotoxicity of target Raji B cells at all antibody concentrations tested for v875 and v873. FIG. 18B illustrates that Fc blocking of resting PBMC results in a reduction in the % cytotoxicity of target Raji B cells at all antibody concentrations tested for v875 and v873.

[0062] FIG. 19A-19B: FIG. 19A shows that v875 and v873 elicit >30% cytotoxicity to target Raji B cells with IL-2 activiated CD8+ T cells as effectors, and maximal target cell killing is seen at the 3 nM concentration. FIG. 19B shows that v875 and v873 elicit dose dependent (>20%) cytotoxicity to target Raji B cells with resting CD8+ T cells as effectors.

[0063] FIG. 20A-20B: FIG. 20A shows the target Raji B cell cytotoxicty of v875 with IL-2 activated CD4+ and CD8+ T cells. FIG. 20B shows the target Raji B cell cytotoxicty of v875 with resting CD4+ and CD8+ T cells.

[0064] FIG. 21 shows, relative to untreated media and human IgG controls, that v875 and v873 (300 nM) mediate autologous B cell killing in total resting PBMC and total IL-2 activated PBMC.

[0065] FIG. 22 shows, relative to untreated media and human IgG controls, v875 has a more selective B cell killing by sparing more autologous T cells compared to v873 and v891.

[0066] FIG. 23A-23D: FIG. 23A shows the effects of v875 on the viability of CD20+, CD4+, CD8+ subsets in IL-2 activated cell cultures. FIG. 23B shows the effects of v875 on the viability of CD20+, CD4+, CD8+ subsets resting cell cultures. FIG. 23C shows the effects of v1379 and v1380 on the viability of CD20+, CD4+, CD8+ subsets in IL-2 activated cell cultures. FIG. 23D shows shows the effects of v1379 and v1380 on the viability of CD20+, CD4+, CD8+ subsets resting cell cultures.

[0067] FIG. 24A-24B: Results of antibody mediated LDH release in resting effector and Raji B cells shown in FIG. 24A. Results of antibody mediated LDH release in activiated effector are shown in FIG. 24B.

[0068] FIG. 25A-25D: FIG. 25A illustrates the mediation of ADCC by rituximab and by a heteromultimer described herein with a WT Fc (v875) (ca. 40% max cell lysis). FIG. 25B shows that v1379 which is a heteromultimer described herein with a WT Fc can mediate ADCC while v1380, with a L234A_L235A knock Fc mutation, is impaired in ADCC to target Daudi B cells. FIG. 25C-25D show the results of the CDC assay with v1380 and v1379 (FIG. 25C) and v875 (FIG. 25D) of target Daudi B cells with comparisons to positive control Rituximab.

[0069] FIG. 26 shows that at 0.3 nM, v875 and v1380 do not induce PBMC proliferation compared to human IgG. The lower panel of FIG. 26 shows the results of the 100 nM antibody concentrations, and shows that v875, v1380 and v891 induce higher cell proliferation relative to human IgG. FIG. 26 (lower panel) also shows that at 100 nM, v875 has a similar proliferative index compared to anti-CD3 OKT3 in all four PBMC populations.

[0070] FIG. 27A-27E: show that v1380 (L234A_L235A Fc knockout) induces less cytokine release of TNFα, INFγ, IL-2, IL-4, and IL-10 when compared to v875 (WT Fc) and OKT3. The results from the cytokine release assay as shown in FIG. 27A-27E include summary plots of PBMC supernatant TNFα (FIG. 27A) INFγ (FIG. 27B), IL-2 (FIG. 27C), IL-4 (FIG. 27D), and IL-10 (FIG. 27E) levels following incubation with test items at 0.3 nM concentrations for 4 days (graph y-axis represents log cytokine levels in pg per mL from 4 donors).

[0071] FIG. 28A-28B: show the results from the average stimulation index induced by v875 at 0.3 nM (FIG. 28A) and 100 nM (FIG. 28B) concentrations on purified CD8+ T cells in the absence or presence of purified CD19+ B cells at 4 days incubation time-point.

[0072] FIG. 29A-29B: show the results from the average stimulation index induced by v1380 at 0.3 nM (FIG. 29A) and 100 nM (FIG. 29B) concentrations on purified CD8+ T cells in the absence or presence of purified CD19+ B cells at 4 days incubation time-point.

[0073] FIG. 30A-30C: show the results from the T:B cell bridging microscopy comparing v875 and human IgG (3 nM) at 200× and 400× magnification. FIG. 30A shows a direct comparison of human IgG and v875 at 200× magnification and illustrates a higher amount of bridging visible between Raji B cell and Jurkat T cells compared to human IgG. FIG. 30B and FIG. 30C show two fields of view for v875 (FIG. 30B) and human IgG (FIG. 30C) at 400× magnification.

[0074] FIG. 31A-31B: FIG. 31A shows the SDS-PAGE analysis and relative purity of v875, v1380, v1379 and v891 following protein A and SEC purification, and following 47 day storage at 4° C. FIG. 31B shows the SDS-PAGE analysis and relative purity of additional exemplary hetermultimers including v875, v1653, v1654, v1655, v1656, v1660, v1800, and v1802 following protein A and SEC purification.

[0075] FIG. 32 shows the LC-MS results of the Max Ent. molecular weight profiles for v875.

[0076] FIG. 33A-33C: show DSC results for heteromultimer constructs described herein, showing that v875 has an estimated CH3 Tm>76° C. (FIG. 33A), v1380 has an estimated CH3 Tm>82.3° C., and v1379 has an estimated CH3 Tm>82.5° C. (FIG. 33C).

[0077] FIG. 34A-C: show ability of heteromultimers described herein to bridge Raji B and Jurkat T cells (B:T), as well Raji:Raji B cell bridging (B:B) and Jurkat:Jurkat T cell bridging (T:T) assessed by FACS. FIG. 34A shows the amount of T:B, B:B and T:T bridging of v875, v1379, v1380, v891, v1381, commercial OKT3 and human IgG over three experimental replicates. FIG. 34B shows the amount of T:B, B:B and T:T bridging of variants with engineered anti-CD3 warheads for stability enhancement (v1653, v1654, v1655, v1656, v1660, v1800, v1802) and v875, and human IgG. FIG. 34C shows the amount of T:B, B:B and T:T bridging of Fc knock-out variants that have either engineered anti-CD3 warheads for stability enhancement (v1666), or have human/cynomolgous monkey cross-reactive anti-CD3 and anti-CD19 scFvs (v4541, v4543, v4545, v4548) commercial OKT3 anti-CD3 control, v2176 anti-CD19 control and human IgG negative control, and all variants mediate low T:T bridging.

[0078] FIG. 35 illustrates binding of heteromultimers described herein to human CD3 (top panel) and binding to the cynomologous CD3 receptor (bottom panel) as determined by ELISA.

[0079] FIG. 36A-36B: illustrates affinity on linear and log scales respectively of HER2/HER3 het-Fc construct demonstrating both bi-specificity and avidity.

[0080] FIG. 37 depicts the binding of variant 1090 compared to the control 1087 in MALME-3M cells and indicates that v1090 has similar binding as v1087 to target MALME-3M cells.

### DETAILED DESCRIPTION OF THE INVENTION

[0081] Unless defined otherwise, all technical and scientific terms used herein have the same meaning as is commonly understood by one of skill in the art to which the claimed subject matter belongs. In the event that there are a plurality of definitions for terms herein, those in this section prevail. Where reference is made to a URL or other such identifier or address, it is understood that such identifiers can change and particular information on the internet can come and go, but equivalent information can be found by searching the internet. Reference thereto evidences the availability and public dissemination of such information.

[0082] It is to be understood that the foregoing general description and the following detailed description are exemplary and explanatory only and are not restrictive of any subject matter claimed. In this application, the use of the singular includes the plural unless specifically stated otherwise.

[0083] Terms understood by those in the art of antibody technology are each given the meaning acquired in the art, unless expressly defined differently herein. Antibodies are known to have variable regions, a hinge region, and constant domains. Immunoglobulin structure and function are reviewed, for example, in Harlow et al, Eds., Antibodies: A Laboratory Manual, Chapter 14 (Cold Spring Harbor Laboratory, Cold Spring Harbor, 1988).

[0084] In the present description, any concentration range, percentage range, ratio range, or integer range is to be understood to include the value of any integer within the recited range and, when appropriate, fractions thereof (such as one tenth and one hundredth of an integer), unless otherwise indicated. As used herein, “about” means±10% of the indicated range, value, sequence, or structure, unless otherwise indicated. It should be understood that the terms “a” and “an” as used herein refer to “one or more” of the enumerated components unless otherwise indicated or dictated by its context. The use of the alternative (e.g., “or”) should be understood to mean either one, both, or any combination thereof of the alternatives. As used herein, the terms “include” and “comprise” are used synonymously. In addition, it should be understood that the individual single chain polypeptides or immunoglobulin constructs derived from various combinations of the structures and substituents described herein are disclosed by the present application to the same extent as if each single chain polypeptide or heterodimer were set forth individually. Thus, selection of particular components to form individual single chain polypeptides or heterodimers is within the scope of the present disclosure

[0085] The section headings used herein are for organizational purposes only and are not to be construed as limiting the subject matter described. All documents, or portions of documents, cited in the application including, but not limited to, patents, patent applications, articles, books, manuals, and treatises are hereby expressly incorporated by reference in their entirety for any purpose.

[0086] It is to be understood that the methods and compositions described herein are not limited to the particular methodology, protocols, cell lines, constructs, and reagents described herein and as such may vary. It is also to be understood that the terminology used herein is for the purpose of describing particular embodiments only, and is not intended to limit the scope of the methods and compositions described herein, which will be limited only by the appended claims.

[0087] All publications and patents mentioned herein are incorporated herein by reference in their entirety for the purpose of describing and disclosing, for example, the constructs and methodologies that are described in the publications, which might be used in connection with the methods, compositions and compounds described herein. The publications discussed herein are provided solely for their disclosure prior to the filing date of the present application. Nothing herein is to be construed as an admission that the inventors described herein are not entitled to antedate such disclosure by virtue of prior invention or for any other reason.

[0088] In the present application, amino acid names and atom names (e.g. N, O, C, etc.) are used as defined by the Protein DataBank (PDB) (www.pdb.org), which is based on the IUPAC nomenclature (IUPAC Nomenclature and Symbolism for Amino Acids and Peptides (residue names, atom names etc.), Eur. J. Biochem., 138, 9-37 (1984) together with their corrections in Eur. J. Biochem., 152, 1 (1985).

[0089] The terms “polypeptide,” “peptide” and “protein” are used interchangeably herein to refer to a polymer of amino acid residues. That is, a description directed to a polypeptide applies equally to a description of a peptide and a description of a protein, and vice versa. The terms apply to naturally occurring amino acid polymers as well as amino acid polymers in which one or more amino acid residues is a non-naturally encoded amino acid. As used herein, the terms encompass amino acid chains of any length, including full length proteins, wherein the amino acid residues are linked by covalent peptide bonds.

[0090] The term “nucleotide sequence” is intended to indicate a consecutive stretch of two or more nucleotide molecules. The nucleotide sequence may be of genomic, cDNA, RNA, semisynthetic or synthetic origin, or any combination thereof.

[0091] The term “polymerase chain reaction” or “PCR” generally refers to a method for amplification of a desired nucleotide sequence in vitro, as described, for example, in U.S. Pat. No. 4,683,195. In general, the PCR method involves repeated cycles of primer extension synthesis, using oligonucleotide primers capable of hybridising preferentially to a template nucleic acid.

[0092] “Cell”, “host cell”, “cell line” and “cell culture” are used interchangeably herein and all such terms should be understood to include progeny resulting from growth or culturing of a cell. “Transformation” and “transfection” are used interchangeably to refer to the process of introducing DNA into a cell.

[0093] The term “amino acid” refers to naturally occurring and non-naturally occurring amino acids, as well as amino acid analogs and amino acid mimetics that function in a manner similar to the naturally occurring amino acids. Naturally encoded amino acids are the 20 common amino acids (alanine, arginine, asparagine, aspartic acid, cysteine, glutamine, glutamic acid, glycine, histidine, isoleucine, leucine, lysine, methionine, phenylalanine, praline, serine, threonine, tryptophan, tyrosine, and valine) and pyrrolysine and selenocysteine. Amino acid analogs refers to compounds that have the same basic chemical structure as a naturally occurring amino acid, i.e., an a carbon that is bound to a hydrogen, a carboxyl group, an amino group, and an R group, such as, homoserine, norleucine, methionine sulfoxide, methionine methyl sulfonium. Such analogs have modified R groups (such as, norleucine) or modified peptide backbones, but retain the same basic chemical structure as a naturally occurring amino acid. Reference to an amino acid includes, for example, naturally occurring proteogenic L-amino acids; D-amino acids, chemically modified amino acids such as amino acid variants and derivatives; naturally occurring non-proteogenic amino acids such as β-alanine, ornithine, etc.; and chemically synthesized compounds having properties known in the art to be characteristic of amino acids. Examples of non-naturally occurring amino acids include, but are not limited to, α-methyl amino acids (e.g. α-methyl alanine), D-amino acids, histidine-like amino acids (e.g., 2-amino-histidine, β-hydroxy-histidine, homohistidine), amino acids having an extra methylene in the side chain (“homo” amino acids), and amino acids in which a carboxylic acid functional group in the side chain is replaced with a sulfonic acid group (e.g., cysteic acid). The incorporation of non-natural amino acids, including synthetic non-native amino acids, substituted amino acids, or one or more D-amino acids into the proteins of the present invention may be advantageous in a number of different ways. D-amino acid-containing peptides, etc., exhibit increased stability in vitro or in vivo compared to L-amino acid-containing counterparts. Thus, the construction of peptides, etc., incorporating D-amino acids can be particularly useful when greater intracellular stability is desired or required. More specifically, D-peptides, etc., are resistant to endogenous peptidases and proteases, thereby providing improved bioavailability of the molecule, and prolonged lifetimes in vivo when such properties are desirable. Additionally, D-peptides, etc., cannot be processed efficiently for major histocompatibility complex class II-restricted presentation to T helper cells, and are therefore, less likely to induce humoral immune responses in the whole organism.

[0094] Amino acids may be referred to herein by either their commonly known three letter symbols or by the one-letter symbols recommended by the IUPAC-IUB Biochemical Nomenclature Commission. Nucleotides, likewise, may be referred to by their commonly accepted single-letter codes.

[0095] “Conservatively modified variants” applies to both amino acid and nucleic acid sequences. With respect to particular nucleic acid sequences, “conservatively modified variants” refers to those nucleic acids which encode identical or essentially identical amino acid sequences, or where the nucleic acid does not encode an amino acid sequence, to essentially identical sequences. Because of the degeneracy of the genetic code, a large number of functionally identical nucleic acids encode any given protein. For instance, the codons GCA, GCC, GCG and GCU all encode the amino acid alanine. Thus, at every position where an alanine is specified by a codon, the codon can be altered to any of the corresponding codons described without altering the encoded polypeptide. Such nucleic acid variations are “silent variations,” which are one species of conservatively modified variations. Every nucleic acid sequence herein which encodes a polypeptide also describes every possible silent variation of the nucleic acid. One of ordinary skill in the art will recognize that each codon in a nucleic acid (except AUG, which is ordinarily the only codon for methionine, and TGG, which is ordinarily the only codon for tryptophan) can be modified to yield a functionally identical molecule. Accordingly, each silent variation of a nucleic acid which encodes a polypeptide is implicit in each described sequence.

[0096] As to amino acid sequences, one of ordinary skill in the art will recognize that individual substitutions, deletions or additions to a nucleic acid, peptide, polypeptide, or protein sequence which alters, adds or deletes a single amino acid or a small percentage of amino acids in the encoded sequence is a “conservatively modified variant” where the alteration results in the deletion of an amino acid, addition of an amino acid, or substitution of an amino acid with a chemically similar amino acid. Conservative substitution tables providing functionally similar amino acids are known to those of ordinary skill in the art. Such conservatively modified variants are in addition to and do not exclude polymorphic variants, interspecies homologs, and alleles of the invention.

[0097] Conservative substitution tables providing functionally similar amino acids are known to those of ordinary skill in the art. The following eight groups each contain amino acids that are conservative substitutions for one another:

[0098] 1) Alanine (A), Glycine (G);

[0099] 2) Aspartic acid (D), Glutamic acid (E);

[0100] 3) Asparagine (N), Glutamine (Q);

[0101] 4) Arginine (R), Lysine (K);

[0102] 5) Isoleucine (I), Leucine (L), Methionine (M), Valine (V);

[0103] 6) Phenylalanine (F), Tyrosine (Y), Tryptophan (W);

[0104] 7) Serine (S), Threonine (T); and [0139] 8) Cysteine (C), Methionine (M)

[0105] (see, e.g., Creighton, Proteins: Structures and Molecular Properties (W H Freeman & Co.; 2nd edition (December 1993)

[0106] The terms “identical” or percent “identity,” in the context of two or more nucleic acids or polypeptide sequences, refer to two or more sequences or subsequences that are the same. Sequences are “substantially identical” if they have a percentage of amino acid residues or nucleotides that are the same (i.e., about 50% identity, about 55% identity, 60% identity, about 65%, about 70%, about 75%, about 80%, about 85%, about 90%, or about 95% identity over a specified region), when compared and aligned for maximum correspondence over a comparison window, or designated region as measured using one of the following sequence comparison algorithms (or other algorithms available to persons of ordinary skill in the art) or by manual alignment and visual inspection. This definition also refers to the complement of a test sequence. The identity can exist over a region that is at least about 50 amino acids or nucleotides in length, or over a region that is 75-100 amino acids or nucleotides in length, or, where not specified, across the entire sequence of a polynucleotide or polypeptide. A polynucleotide encoding a polypeptide of the present invention, including homologs from species other than human, may be obtained by a process comprising the steps of screening a library under stringent hybridization conditions with a labeled probe having a polynucleotide sequence of the invention or a fragment thereof, and isolating full-length cDNA and genomic clones containing said polynucleotide sequence. Such hybridization techniques are well known to the skilled artisan.

[0107] A derivative, or a variant of a polypeptide is said to share “homology” or be “homologous” with the peptide if the amino acid sequences of the derivative or variant has at least 50% identity with a 100 amino acid sequence from the original peptide. In certain embodiments, the derivative or variant is at least 75% the same as that of either the peptide or a fragment of the peptide having the same number of amino acid residues as the derivative. In certain embodiments, the derivative or variant is at least 85% the same as that of either the peptide or a fragment of the peptide having the same number of amino acid residues as the derivative. In certain embodiments, the amino acid sequence of the derivative is at least 90% the same as the peptide or a fragment of the peptide having the same number of amino acid residues as the derivative. In some embodiments, the amino acid sequence of the derivative is at least 95% the same as the peptide or a fragment of the peptide having the same number of amino acid residues as the derivative. In certain embodiments, the derivative or variant is at least 99% the same as that of either the peptide or a fragment of the peptide having the same number of amino acid residues as the derivative.

[0108] The term “bispecific” is intended to include any agent, e.g., heteromultimer, monomer, protein, peptide, or protein or peptide complex, which has two different binding specificities. For example, in some embodiments, the molecule may bind to, or interact with, (a) a cell surface target molecule and (b) an Fc receptor on the surface of an effector cell. In certain embodiments of a heteromultimer described herein, at least one monomer is bispecific formed by attaching to the same transporter polypeptide, two cargo molecules with different binding specificities. In certain embodiments of a heteromultimer described herein, the heteromultimer is itself bispecific formed by attaching to the transporter polypeptides, at least two cargo molecules with different specificities.

[0109] The term “multispecific” or “heterospecific” is intended to include any agent, e.g., a protein, peptide, or protein or peptide complex, which has more than two different binding specificities. For example, the molecule may bind to, or interact with, (a) a cell surface target molecule such as but not limited to cell surface antigens, (b) an Fc receptor on the surface of an effector cell, and optionally (c) at least one other component. Accordingly, embodiments of the heteromultimers described herein, are inclusive of, but not limited to, bispecific, trispecific, tetraspecific, and other multispecific molecules. In certain embodiments, these molecules are directed to cell surface antigens, such as CD30, and to other targets, such as Fc receptors on effector cells.

[0110] As used herein, “isolated” heteromultimer means a heteromultimer that has been identified and separated and/or recovered from a component of its natural cell culture environment. Contaminant components of its natural environment are materials that would interfere with diagnostic or therapeutic uses for the heteromultimer, and may include enzymes, hormones, and other proteinaceous or non-proteinaceous solutes.

[0111] The phrase “selectively (or specifically) hybridizes to” refers to the binding, duplexing, or hybridizing of a molecule only to a particular nucleotide sequence under stringent hybridization conditions when that sequence is present in a complex mixture (including but not limited to, total cellular or library DNA or RNA).

[0112] The phrase “stringent hybridization conditions” refers to hybridization of sequences of DNA, RNA, or other nucleic acids, or combinations thereof under conditions of low ionic strength and high temperature as is known in the art. Typically, under stringent conditions a probe will hybridize to its target subsequence in a complex mixture of nucleic acid (including but not limited to, total cellular or library DNA or RNA) but does not hybridize to other sequences in the complex mixture. Stringent conditions are sequence-dependent and will be different in different circumstances. Longer sequences hybridize specifically at higher temperatures. An extensive guide to the hybridization of nucleic acids is found in Tijssen, Laboratory Techniques in Biochemistry and Molecular Biology—Hybridization with Nucleic Probes, “Overview of principles of hybridization and the strategy of nucleic acid assays” (1993).

[0113] As used herein, an “antibody” or “immunoglobulin” refers to a polypeptide substantially encoded by an immunoglobulin gene or immunoglobulin genes, or fragments thereof, which specifically bind and recognize an analyte (antigen). The recognized immunoglobulin genes include the kappa, lambda, alpha, gamma, delta, epsilon and mu constant region genes, as well as the myriad immunoglobulin variable region genes. Light chains are classified as either kappa or lambda. Heavy chains are classified as gamma, mu, alpha, delta, or epsilon, which in turn define the immunoglobulin classes, IgG, IgM, IgA, IgD, and IgE, respectively.

[0114] An exemplary immunoglobulin (antibody) structural unit is composed of two pairs of polypeptide chains, each pair having one “light” (about 25 kD) and one “heavy” chain (about 50-70 kD). The N-terminal domain of each chain defines a variable region of about 100 to 110 or more amino acids primarily responsible for antigen recognition. The terms variable light chain (VL) and variable heavy chain (VH) refer to these light and heavy chain domains respectively. The IgG1 heavy chain comprises of the VH, CH1, CH2 and CH3 domains respectively from the N to C-terminus. The light chain comprises of the VL and CL domains from N to C terminus. The IgG1 heavy chain comprises a hinge between the CH1 and CH2 domains. In certain embodiments, the immunoglobulin constructs comprise at least one immunoglobulin domain from IgG, IgM, IgA, IgD, or IgE connected to a therapeutic polypeptide. In some embodiments, the immunoglobulin domain comprised in an immunoglobulin construct provided herein, is from an immunoglobulin based construct such as a diabody, or a nanobody. In certain embodiments, the immunoglobulin constructs described herein comprise at least one immunoglobulin domain from a heavy chain antibody such as a camelid antibody. In certain embodiments, the immunoglobulin constructs provided herein comprise at least one immunoglobulin domain from a mammalian antibody such as a bovine antibody, a human antibody, a camelid antibody, a mouse antibody or any chimeric antibody.

[0115] As used herein, the term “antigenic determinant” is synonymous with “antigen” and “epitope,” and refers to a site (e.g. a contiguous stretch of amino acids or a conformational configuration made up of different regions of non-contiguous amino acids) on a polypeptide macromolecule to which an antigen binding moiety binds, forming an antigen binding moiety-antigen complex. Useful antigenic determinants can be found, for example, on the surfaces of tumor cells, on the surfaces of virus-infected cells, on the surfaces of other diseased cells, on the surface of immune cells, free in blood serum, and/or in the extracellular matrix (ECM). The proteins referred to as antigens herein (e.g. MCSP, FAP, CEA, EGFR, CD33, CD3) can be any native form the proteins from any vertebrate source, including mammals such as primates (e.g. humans) and rodents (e.g. mice and rats), unless otherwise indicated. In a particular embodiment the antigen is a human protein. Where reference is made to a specific protein herein, the term encompasses the “full-length”, unprocessed protein as well as any form of the protein that results from processing in the cell. The term also encompasses naturally occurring variants of the protein, e.g. splice variants or allelic variants. Exemplary human proteins useful as antigens include, but are not limited to: Melanoma-associated Chondroitin Sulfate Proteoglycan (MCSP), also known as Chondroitin Sulfate Proteoglycan 4 (UniProt no. Q6UVK1 (version 70), NCBI RefSeq no. NP 001888.2); Fibroblast Activation Protein (FAP), also known as Seprase (Uni Prot nos. Q12884, Q86Z29, Q99998, NCBI Accession no. NP 004451); Carcinoembroynic antigen (CEA), also known as Carcinoembryonic antigen-related cell adhesion molecule 5 (UniProt no. P06731 (version 119), NCBI RefSeq no. NP 004354.2); CD33, also known as gp67 or Siglec-3 (UniProt no. P20138, NCBI Accession nos. NP 001076087, NP 001171079); Epidermal Growth Factor Receptor (EGFR), also known as ErbB-1 or Herl (UniProt no. P0053, NCBI Accession nos. NP 958439, NP 958440), and CD3, particularly the epsilon subunit of CD3 (see UniProt no. P07766 (version 130), NCBI RefSeq no. NP 000724.1, SEQ ID NO: 265 for the human sequence; or UniProt no. Q95LI5 (version 49), NCBI GenBank no. BAB71849.1, SEQ ID NO: 266 for the cynomolgus [Macaca fascicularis] sequence). In certain embodiments the T cell activating bispecific antigen binding molecule of the invention binds to an epitope of an activating T cell antigen or a target cell antigen that is conserved among the activating T cell antigen or target antigen from different species.

[0116] By “specific binding” or “selective binding” is meant that the binding is selective for the antigen and can be discriminated from unwanted or non-specific interactions. The ability of an antigen binding moiety to bind to a specific antigenic determinant can be measured either through an enzyme-linked immunosorbent assay (ELISA) or other techniques familiar to one of skill in the art, e.g. surface plasmon resonance (SPR) technique (analyzed on a BIAcore instrument) (Liljeblad et al, Glyco J 17, 323-329 (2000)), and traditional binding assays (Heeley, Endocr Res 28, 217-229 (2002)). In one embodiment, the extent of binding of an antigen binding moiety to an unrelated protein is less than about 10% of the binding of the antigen binding moiety to the antigen as measured, e.g., by SPR. In certain embodiments, an antigen binding moiety that binds to the antigen, or an antigen binding molecule comprising that antigen binding moiety, has a dissociation constant (K_{D}) of <1 μM, <100 nM, <10 nM, <1 nM, <0.1 nM, <0.01 nM, or <0.001 nM (e.g. 10^{˜8} M or less, e.g. from 10^{˜8} M to 10″¹³ M, e.g., from 10″⁹ M to 10′¹³ M).

[0117] “Affinity” refers to the strength of the sum total of non-covalent interactions between a single binding site of a molecule (e.g., a receptor) and its binding partner (e.g., a ligand). Unless indicated otherwise, as used herein, “binding affinity” refers to intrinsic binding affinity which reflects a 1:1 interaction between members of a binding pair (e.g., an antigen binding moiety and an antigen, or a receptor and its ligand). The affinity of a molecule X for its partner Y can generally be represented by the dissociation constant (K_{D}), which is the ratio of dissociation and association rate constants (k_{off} and kₒₙ, respectively). Thus, equivalent affinities may comprise different rate constants, as long as the ratio of the rate constants remains the same. Affinity can be measured by well established methods known in the art, including those described herein. A particular method for measuring affinity is Surface Plasmon Resonance (SPR).

[0118] “Reduced binding”, for example reduced binding to an Fc receptor, refers to a decrease in affinity for the respective interaction, as measured for example by SPR. For clarity the term includes also reduction of the affinity to zero (or below the detection limit of the analytic method), i.e. complete abolishment of the interaction. Conversely, “increased binding” refers to an increase in binding affinity for the respective interaction.

[0119] An “activating T cell antigen” as used herein refers to an antigenic determinant expressed on the surface of a T lymphocyte, particularly a cytotoxic T lymphocyte, which is capable of inducing T cell activation upon interaction with an antigen binding molecule. Specifically, interaction of an antigen binding molecule with an activating T cell antigen may induce T cell activation by triggering the signaling cascade of the T cell receptor complex. In a particular embodiment the activating T cell antigen is CD3.

[0120] “T cell activation” as used herein refers to one or more cellular response of a T lymphocyte, particularly a cytotoxic T lymphocyte, selected from: proliferation, differentiation, cytokine secretion, cytotoxic effector molecule release, cytotoxic activity, and expression of activation markers. The T cell activating bispecific antigen binding molecules of the invention are capable of inducing T cell activation. Suitable assays to measure T cell activation are known in the art described herein.

[0121] A “target cell antigen” as used herein refers to an antigenic determinant presented on the surface of a target cell, for example a B cell in a tumor such as a cancer cell or a cell of the tumor stroma. As used herein, the terms “first” and “second” with respect to antigen binding moieties etc., are used for convenience of distinguishing when there is more than one of each type of moiety. Use of these terms is not intended to confer a specific order or orientation of the T cell activating bispecific antigen binding molecule unless explicitly so stated.

[0122] A “Fab molecule” refers to a protein consisting of the VH and CH1 domain of the heavy chain (the “Fab heavy chain”) and the VL and CL domain of the light chain (the “Fab light chain”) of an immunoglobulin.

[0123] By “fused” is meant that the components (e.g. a Fab molecule and an Fc domain subunit) are linked by peptide bonds, either directly or via one or more peptide linkers.

[0124] As used herein, the term “single-chain” refers to a molecule comprising amino acid monomers linearly linked by peptide bonds. In certain embodiments, one of the antigen binding moieties is a single-chain Fab molecule, i.e. a Fab molecule wherein the Fab light chain and the Fab heavy chain are connected by a peptide linker to form a single peptide chain. In a particular such embodiment, the C-terminus of the Fab light chain is connected to the N-terminus of the Fab heavy chain in the single-chain Fab molecule. In certain other embodiments, one of the antigen binding moieties is a single-chain Fv molecule

[0125] By a “crossover” Fab molecule (also termed “Crossfab”) is meant a Fab molecule wherein either the variable regions or the constant regions of the Fab heavy and light chain are exchanged, i.e. the crossover Fab molecule comprises a peptide chain composed of the light chain variable region and the heavy chain constant region, and a peptide chain composed of the heavy chain variable region and the light chain constant region. For clarity, in a crossover Fab molecule wherein the variable regions of the Fab light chain and the Fab heavy chain are exchanged, the peptide chain comprising the heavy chain constant region is referred to herein as the “heavy chain” of the crossover Fab molecule. Conversely, in a crossover Fab molecule wherein the constant regions of the Fab light chain and the Fab heavy chain are exchanged, the peptide chain comprising the heavy chain variable region is referred to herein as the “heavy chain” of the crossover Fab molecule.

[0126] “Framework” or “FR” refers to variable domain residues other than hypervariable region (HVR) residues. The FR of a variable domain generally consists of four FR domains: FR1, FR2, FR3, and FR4. Accordingly, the HVR and FR sequences generally appear in the following sequence in VH (or VL): FR1-H1(L1)-FR2-H2(L2)-FR3-H3(L3)-FR4.

[0127] The “class” of an antibody or immunoglobulin refers to the type of constant domain or constant region possessed by its heavy chain. There are five major classes of antibodies: IgA, IgD, IgE,

[0128] IgG, and IgM, and several of these may be further divided into subclasses (isotypes), e.g., IgGi, IgG₂, IgG₃, IgG₄, IgAi, and IgA₂. The heavy chain constant domains that correspond to the different classes of immunoglobulins are called α, δ, ε, γ, and μ, respectively.

[0129] The term “Fc domain” or “Fc region” herein is used to define a C-terminal region of an immunoglobulin heavy chain that contains at least a portion of the constant region. The term includes native sequence Fc regions and variant Fc regions. Although the boundaries of the Fc region of an IgG heavy chain might vary slightly, the human IgG heavy chain Fc region is usually defined to extend from Cys226, or from Pro230, to the carboxyl-terminus of the heavy chain. However, the C-terminal lysine (Lys447) of the Fc region may or may not be present. Unless otherwise specified herein, numbering of amino acid residues in the Fc region or constant region is according to the EU numbering system, also called the EU index, as described in Kabat et al, Sequences of Proteins of Immunological Interest, 5th Ed. Public Health Service, National Institutes of Health, Bethesda, Md., 1991. A “subunit” of an Fc domain as used herein refers to one of the two polypeptides forming the dimeric Fc domain, i.e. a polypeptide comprising C-terminal constant regions of an immunoglobulin heavy chain, capable of stable self-association. For example, a subunit of an IgG Fc domain comprises an IgG CH2 and an IgG CH3 constant domain.

[0130] A “modification promoting the association of the first and the second subunit of the Fc domain” is a manipulation of the peptide backbone or the post-translational modifications of an Fc domain subunit that reduces or prevents the association of a polypeptide comprising the Fc domain subunit with an identical polypeptide to form a homodimer. A modification promoting association as used herein particularly includes separate modifications made to each of the two Fc domain subunits desired to associate (i.e. the first and the second subunit of the Fc domain), wherein the promote association of the two Fc domain subunits and the formation of heterodimers. For example in certain embodiments, a modification promoting association may alter the structure or charge of one or both of the Fc domain subunits so as to make their association favorable.

[0131] The term “effector functions” refers to those biological activities attributable to the Fc region of an antibody, which vary with the antibody isotype. Examples of antibody effector functions include: Clq binding and complement dependent cytotoxicity (CDC), Fc receptor binding, antibody-dependent cell-mediated cytotoxicity (ADCC), antibody-dependent cellular phagocytosis (AD CP), cytokine secretion, immune complex-mediated antigen uptake by antigen presenting cells, down regulation of cell surface receptors (e.g. B cell receptor), and B cell activation.

[0132] As used herein, “albumin” refers collectively to albumin protein or amino acid sequence, or an albumin segment or variant, having one or more functional activities (e.g., biological activities) of albumin. In particular “albumin” refers to human albumin or segments thereof (see for example, EP 201 239, EP 322 094 WO 97/24445, WO95/23857) especially the mature form of human albumin, or albumin from other vertebrates, or segments thereof, or analogs or variants of these molecules or fragments thereof. In certain embodiments, albumin refers to a truncated version of albumin.

[0133] The term “quasi-albumin” refers to a heteromultimer molecule that has structure and/or function similar to the whole albumin, and wherein said heteromultimer molecule is formed by the assembly of two or more monomeric polypeptides designed based on the sequence of the whole albumin. In certain embodiments, the monomeric polypeptides are “segments” that preferentially associate as heteromultimeric pairs to form a quasi-protein. In some embodiments, the quasi-albumin has 90% of the activity of the whole albumin. In some embodiments, the quasi-albumin has 75% of the activity of whole-albumin. In an embodiment, the quasi-albumin has 50% of the activity of whole albumin. In some embodiments, the quasi-albumin has 50-75% of the activity of whole albumin. In an embodiment, quasi-albumin has 80% of the activity of whole albumin. In some embodiments, the quasi-albumin has 90% of the structure of whole albumin as determined by molecular modeling. In some embodiments, the quasi-albumin has 80% of the structure of whole albumin as determined by molecular modeling. In some embodiments, the quasi-albumin has 70% of the structure of whole albumin as determined by molecular modeling. In some embodiments, the quasi-albumin has 50% of the structure of whole albumin as determined by molecular modeling. In some embodiments, the quasi-albumin has 50%-75% of the structure of whole albumin as determined by molecular modeling.

[0134] The terms, human serum albumin (HSA) and human albumin (HA) are used interchangeably herein. The terms, “albumin and serum albumin” are broader, and encompass human serum albumin (and fragments and variants thereof) as well as albumin from other species (and fragments and variants thereof).

[0135] In certain embodiments, each albumin-based construct described herein is based on a variant of normal HA. The term “variants” includes insertions, deletions and substitutions, either conservative or non conservative, where such changes do not substantially alter one or more of the oncotic, useful ligand-binding and non-immunogenic properties of albumin, or the active site, or active domain which confers the therapeutic activities of therapeutic proteins.

[0136] In certain embodiments, the isolated heteromultimeric constructs described herein include naturally occurring polymorphic variants of human albumin and fragments of human albumin, for example those fragments disclosed in EP 322 094 (namely HA (Pn), where n is 369 to 419).

[0137] In certain embodiments, the albumin is derived from any vertebrate, especially any mammal that includes but is not limited to human, cow, sheep, rat, mouse, rabbit, horse, dog or pig. In certain embodiments, the albumin is derived from non-mammalian albumins including, but are not limited to hen and salmon.

[0138] The sequence of human albumin is as shown:

SEQ ID NO: 1
MKWVTFISLLFLFSSAYSRGVFRRDAHKSEVAHRFKDLGEENFKA
LVLIAFAQYLQQCPFEDHVKLVNEVTEFAKTCVADESAENCDKSL
HTLFGDKLCTVATLRETYGEMADCCAKQEPERNECFLQHKDDNPNL
PRLVRPEVDVMCTAFHDNEETFLKKYLYEIARRHPYFYAPELLFFA
KRYKAAFTECCQAADKAACLLPKLDELRDEGKASSAKQRLKCASLQ
KFGERAFKAWAVARLSQRFPKAEFAEVSKLVTDLTKVHTECCHGDL
LECADDRADLAKYICENQDSISSKLKECCEKPLLEKSHCIAEVEND
EMPADLPSLAADFVESKDVCKNYAEAKDVFLGMFLYEYARRHPDYS
WLLLRLAKTYETTLEKCCAAADPHECYAKVFDEFKPLVEEPQNLI
KQNCELFEQLGEYKFQNALLVRYTKKVPQVSTPTLVEVSRNLGKVG
SKCCKHPEAKRMPCAEDYLSVVLNQLCVLHEKTPVSDRVTKCCTES
LVNRRPCFSALEVDETYVPKEFNAETFTFHADICTLSEKERQIKKQ
TALVELVKHKPKATKEQLKAVMDDFAAFVEKCCKADDKETCFAEEG
KKLVAASQAALGL

[0139] An “alloalbumin” is a genetic variant of albumin. In certain embodiments the alloalbumin is human alloalbumin (HAA). Alloalbumins that differ in electrophoretic mobility from albumin have been identified through population genetics surveys in the course of clinical electrophoresis, or in blood donor surveys. As markers of mutation and migration, alloalbumins are of interest to geneticists, biochemists, and anthropologists, but most of these alloalbumin are not associated with disease (Minchioti et al. Human Mutations 29(8), 1007-1016(2008)).

TABLE 1
List of substitutions comprised by various alloalbumins as
compared to HA of SEQ ID NO: 1. Thermostability, half-life
information and other HAAs are provided in Krogh-hansen
et al. Biochim Biophys Acta 1747, 81-88(2005); and
WO2011051489 incorporated by reference herein.

| | Thermostability (C.) | |
|---|---|---|
| | (positive = stabilizing, | Effect on half-life |
| Mutation | negative = destabilizing) | (% change) |
| H3Y | N/A | N/A |
| H3Q | N/A | N/A |
| Q32Stop | N/A | N/A |
| E60K | N/A | N/A |
| D63N | 6.07 | N/A |
| L66P | N/A | N/A |
| E82K | 2.03 | N/A |
| R114G | N/A | N/A |
| R114Stop | N/A | N/A |
| E119K | N/A | N/A |
| V122E | 0.57 | N/A |
| H128R | N/A | N/A |
| Y140C | N/A | N/A |
| A175Stop | N/A | N/A |
| C177F | −1.59 | N/A |
| R218H | N/A | N/A |
| R218P | N/A | N/A |
| K225Q* | −4.86 | N/A |
| K240E | N/A | N/A |
| E244Stop | N/A | N/A |
| Q268R | N/A | N/A |
| D269G | 3.67 | N/A |
| K276N | 4.87 | N/A |
| K313N | −7.16 | N/A |
| D314G | −0.38 | N/A |
| D314V | N/A | N/A |
| N318K | N/A | N/A |
| A320T,&-1R | N/A | 6.16 |
| E321K | 1.42 | N/A |
| E333K | −2.56 | N/A |
| E354K | N/A | N/A |
| E358K | N/A | N/A |
| K359K | −6.56 | N/A |
| D365H | 0.89 | N/A |
| D365V | N/A | N/A |
| E368G | N/A | N/A |
| K372E | N/A | N/A |
| D375N | N/A | N/A |
| D375H | −0.09 | N/A |
| E376K | N/A | N/A |
| E376Q | N/A | N/A |
| E382K | N/A | N/A |
| Q385Stop | N/A | N/A |
| Y401Stop | N/A | N/A |
| R410C | N/A | N/A |
| E479K | N/A | N/A |
| D494N | N/A | 0.84 |
| E501K | 0.13 | N/A |
| E505K | 1.87 | N/A |
| I513N | N/A | N/A |
| V533M | N/A | N/A |
| K536E | N/A | N/A |
| K541E | 6.12 | N/A |
| D550G | N/A | N/A |
| D550A | N/A | N/A |
| K560E | 0.70 | N/A |
| D563N | 4.17 | N/A |
| E565K | N/A | N/A |
| E570K | −6.53 | N/A |
| K573E | 2.08 | 2.7 |
| K574N | N/A | N/A |
| L575 insertion (TCC | −5.30 | N/A |
| CKSSCLRLITSHLKA | | |
| SQPTMRIRERK) | | |
| Frameshift after | N/A | −5.7% |
| 567; Stop at 582 | | |
| Frameshift after | N/A | −8.9% |
| 572; Stop at 578 | | |

[0140] The term “segmentation” refers to a precise internal splice of the original protein sequence which results in “segments” of the protein sequence that preferentially associate as heteromultimers to form a quasi-protein.

[0141] Quasi-Native Structure:

[0142] With reference to a native protein or its structure, quasi-native proteins and/or ‘quasi-native structures’ present the native protein like functional and structural characteristics. Proteins are naturally dynamics molecules and display an ensemble of structural configurations although we ascribe a native structure to it, such as the one obtained by X-ray crystallography. The alternate structural configurations observed in the ensemble of geometries of that protein can be deemed to be quasi-native structures relative to each other or relative to the structure observed in the crystal. On a different front, homologous proteins sequences or proteins belonging to common structural families tend to fold into similar structural geometries. The member proteins belonging to this family can be deemed to achieve a quasi-native structure relative to each other. Some of the unique sequences in the protein family could also exhibit similar functional attributes and hence can be referred to as quasi-native proteins relative to each other. In the case of heteromultimers described here comprising of two or more protein constructs each of which have a transporter polypeptide component, the transporter polypeptides assemble to form a quasi-native structure. The reference native protein in this case is the protein from which the transporter polypeptide is derived and the reference native structure is the structure of the monomeric protein from which the transporter polypeptide is derived. We describe a case where two or more different polypeptides self-assemble to form a heteromultimeric structural and exhibit functional characteristics like a native protein which itself is a monomeric entity. In certain embodiments, are provided heteromultimer constructs comprising transporter polypeptides derived from albumin that self-assemble to form a heteromultimer that exhibits native albumin like functional characteristics such as FcRn binding and structural characteristics. These heteromultimers are referred to as being quasi-native.

[0143] “CD3 complex” as described herein is a complex of at least five membrane-bound polypeptides in mature T-lymphocytes that are non-covalently associated with one another and with the T-cell receptor. The CD3 complex includes the gamma, delta, epsilon, zeta, and eta chains (also referred to as subunits). Non-human monoclonal antibodies have been developed against some of these chains, as exemplified by the murine antibodies OKT3, SP34, UCHT1 or 64.1. (See e.g., June, et al., J. Immunol. 136:3945-3952 (1986); Yang, et al., J. Immunol. 137:1097-1100 (1986); and Hayward, et al., Immunol. 64:87-92 (1988)). The expression of certain CD antigens is highly restricted to specific lineage. lymphohematopoietic cells and over the past several years, antibodies directed against lymphoid-specific antigens have been used to develop treatments that were effective either in vitro or in animal models (5-13). In this respect CD19 has proved to be a very useful target. CD19 is expressed in the whole B lineage from the pro B cell to the mature B cell, it is not shed, is uniformly expressed on all lymphoma cells, and is absent from stem cells.

[0144] The term “effective amount” as used herein refers to that amount of multispecific heteromultimer construct being administered, which will relieve to some extent one or more of the symptoms of the disease, condition or disorder being treated. Compositions containing a multispecific heteromultimeric construct described herein can be administered for prophylactic, enhancing, and/or therapeutic treatments.

[0145] As used herein, the terms “engineer, engineered, engineering”, are considered to include any manipulation of the peptide backbone or the post-translational modifications of a naturally occurring or recombinant polypeptide or fragment thereof. Engineering includes modifications of the amino acid sequence, of the glycosylation pattern, or of the side chain group of individual amino acids, as well as combinations of these approaches. The engineered proteins are expressed and produced by standard molecular biology techniques.

[0146] By “isolated nucleic acid molecule or polynucleotide” is intended a nucleic acid molecule, DNA or RNA, which has been removed from its native environment. For example, a recombinant polynucleotide encoding a polypeptide contained in a vector is considered isolated. Further examples of an isolated polynucleotide include recombinant polynucleotides maintained in heterologous host cells or purified (partially or substantially) polynucleotides in solution. An isolated polynucleotide includes a polynucleotide molecule contained in cells that ordinarily contain the polynucleotide molecule, but the polynucleotide molecule is present extrachromosomally or at a chromosomal location that is different from its natural chromosomal location. Isolated RNA molecules include in vivo or in vitro RNA transcripts, as well as positive and negative strand forms, and double-stranded forms. Isolated polynucleotides or nucleic acids described herein, further include such molecules produced synthetically. In addition, a polynucleotide or a nucleic acid, in certain embodiments, include a regulatory element such as a promoter, ribosome binding site, or a transcription terminator.

[0147] By a nucleic acid or polynucleotide having a nucleotide sequence at least, for example, 95% “identical” to a reference nucleotide sequence of the present invention, it is intended that the nucleotide sequence of the polynucleotide is identical to the reference sequence except that the polynucleotide sequence may include up to five point mutations per each 100 nucleotides of the reference nucleotide sequence. In other words, to obtain a polynucleotide having a nucleotide sequence at least 95% identical to a reference nucleotide sequence, up to 5% of the nucleotides in the reference sequence may be deleted or substituted with another nucleotide, or a number of nucleotides up to 5% of the total nucleotides in the reference sequence may be inserted into the reference sequence. These alterations of the reference sequence may occur at the 5′ or 3′ terminal positions of the reference nucleotide sequence or anywhere between those terminal positions, interspersed either individually among residues in the reference sequence or in one or more contiguous groups within the reference sequence. As a practical matter, whether any particular polynucleotide sequence is at least 80%, 85%, 90%, 95%, 96%, 97%, 98% or 99% identical to a nucleotide sequence of the present invention can be determined conventionally using known computer programs, such as the ones discussed above for polypeptides (e.g. ALIGN-2).

[0148] The term “expression cassette” refers to a polynucleotide generated recombinantly or synthetically, with a series of specified nucleic acid elements that permit transcription of a particular nucleic acid in a target cell. The recombinant expression cassette can be incorporated into a plasmid, chromosome, mitochondrial DNA, plastid DNA, virus, or nucleic acid fragment. Typically, the recombinant expression cassette portion of an expression vector includes, among other sequences, a nucleic acid sequence to be transcribed and a promoter. In certain embodiments, the expression cassette of the invention comprises polynucleotide sequences that encode bispecific antigen binding molecules of the invention or fragments thereof.

[0149] The term “vector” or “expression vector” is synonymous with “expression construct” and refers to a DNA molecule that is used to introduce and direct the expression of a specific gene to which it is operably associated in a target cell. The term includes the vector as a self-replicating nucleic acid structure as well as the vector incorporated into the genome of a host cell into which it has been introduced. The expression vector of the present invention comprises an expression cassette. Expression vectors allow transcription of large amounts of stable mRNA. Once the expression vector is inside the target cell, the ribonucleic acid molecule or protein that is encoded by the gene is produced by the cellular transcription and/or translation machinery. In one embodiment, the expression vector of the invention comprises an expression cassette that comprises polynucleotide sequences that encode bispecific antigen binding molecules of the invention or fragments thereof.

[0150] The terms “host cell”, “host cell line,” and “host cell culture” are used interchangeably and refer to cells into which exogenous nucleic acid has been introduced, including the progeny of such cells. Host cells include “transformants” and “transformed cells,” which include the primary transformed cell and progeny derived therefrom without regard to the number of passages. In certain embodiments, progeny are not completely identical in nucleic acid content to a parent cell, but may contain mutations. Mutant progeny that have the same function or biological activity as screened or selected for in the originally transformed cell are included herein. A host cell is any type of cellular system that can be used to generate the bispecific antigen binding molecules of the present invention. Host cells include cultured cells, e.g. mammalian cultured cells, such as CHO cells, BHK cells, NS0 cells, SP2/0 cells, YO myeloma cells, P3X63 mouse myeloma cells, PER cells, PER.C6 cells or hybridoma cells, yeast cells, insect cells, and plant cells, to name only a few, but also cells comprised within a transgenic animal, transgenic plant or cultured plant or animal tissue.

[0151] An “activating Fc receptor” is an Fc receptor that following engagement by an Fc domain of an antibody elicits signaling events that stimulate the receptor-bearing cell to perform effector functions. Human activating Fc receptors include FcγRIIIa (CD 16a), FcγRI (CD64), and FcγRIIa (CD32).

[0152] Antibody-dependent cell-mediated cytotoxicity (ADCC) is an immune mechanism leading to the lysis of antibody-coated target cells by immune effector cells. The target cells are cells to which antibodies or derivatives thereof comprising an Fc region specifically bind, generally via the protein part that is N-terminal to the Fc region. As used herein, the term “reduced ADCC” is defined as either a reduction in the number of target cells that are lysed in a given time, at a given concentration of antibody in the medium surrounding the target cells, by the mechanism of ADCC defined above, and/or an increase in the concentration of antibody in the medium surrounding the target cells, required to achieve the lysis of a given number of target cells in a given time, by the mechanism of ADCC. The reduction in ADCC is relative to the ADCC mediated by the same antibody produced by the same type of host cells, using the same standard production, purification, formulation and storage methods (which are known to those skilled in the art), but that has not been engineered. For example the reduction in ADCC mediated by an antibody comprising in its Fc domain an amino acid substitution that reduces ADCC, is relative to the ADCC mediated by the same antibody without this amino acid substitution in the Fc domain.

[0153] An “effective amount” of an agent such as a multispecific heteromultimer described herein, refers to the amount that is necessary to result in a physiological change in the cell or tissue to which it is administered.

[0154] A “therapeutically effective amount” of an agent, e.g. a pharmaceutical composition comprising a multispecific heteromultimer described herein, refers to an amount effective, at dosages and for periods of time necessary, to achieve the desired therapeutic or prophylactic result. A therapeutically effective amount of an agent for example eliminates, decreases, delays, minimizes or prevents adverse effects of a disease.

[0155] An “individual” or “subject” is a mammal. Mammals include, but are not limited to, domesticated animals (e.g. cows, sheep, cats, dogs, and horses), primates (e.g. humans and non-human primates such as monkeys), rabbits, and rodents (e.g. mice and rats). Particularly, the individual or subject is a human.

[0156] The term “pharmaceutical composition” refers to a preparation which is in such form as to permit the biological activity of a multispecific heteromultimer construct contained therein to be effective, and which contains no additional components which are unacceptably toxic to a subject to which the formulation would be administered.

[0157] A “pharmaceutically acceptable carrier” refers to an ingredient in a pharmaceutical composition, other than an active ingredient, which is nontoxic to a subject. A pharmaceutically acceptable carrier includes, but is not limited to, a buffer, excipient, stabilizer, or preservative.

[0158] As used herein, “treatment” (and grammatical variations thereof such as “treat” or “treating”) refers to clinical intervention in an attempt to alter the natural course of a disease in the individual being treated, and can be performed either for prophylaxis or during the course of clinical pathology. Desirable effects of treatment include, but are not limited to, preventing occurrence or recurrence of disease, alleviation of symptoms, diminishment of any direct or indirect pathological consequences of the disease, preventing metastasis, decreasing the rate of disease progression, amelioration or palliation of the disease state, and remission or improved prognosis. In some embodiments, multispecific heteromultimer constructs described herein are used to delay development of a disease or to slow the progression of a disease. The term “instructions” is used to refer to instructions customarily included in commercial packages of therapeutic products that contain information about the indications, usage, dosage, administration, combination therapy, contraindications and/or warnings concerning the use of such therapeutic products.

[0159] The term “cross-species binding” or “interspecies binding” as used herein means binding of a binding domain described herein to the same target molecule in humans and other organisims for instance, but not restricted to non-chimpanzee primates. Thus, “cross-species binding” or “interspecies binding” is to be understood as an interspecies reactivity to the same molecule “X” (i.e. the homolog) expressed in different species, but not to a molecule other than “X”. Cross-species specificity of a monoclonal antibody recognizing e.g. human CD3 epsilon, to a non-chimpanzee primate CD3 epsilon, e.g. macaque CD3 epsilon, can be determined, for instance, by FACS analysis. The FACS analysis is carried out in a way that the respective monoclonal antibody is tested for binding to human and non-chimpanzee primate cells, e.g. macaque cells, expressing said human and non-chimpanzee primate CD3 epsilon antigens, respectively. An appropriate assay is shown in the following examples. The above-mentioned subject matter applies mutatis mutandis for the PSCA, CD19, C-MET, Endosialin, EpCAM, IGF-1R and FAPα antigen: Cross-species specificity of a monoclonal antibody recognizing e.g. human PSCA, CD19, C-MET, Endosialin, EpCAM, IGF-1R or FAPα, to a non-chimpanzee primate PSCA, CD19, C-MET, Endosialin, EpCAM, IGF-1R or FAPα, e.g. macaque PSCA, CD19, C-MET, Endosialin, EpCAM, IGF-1R or FAPα, can be determined, for instance, by FACS analysis. The FACS analysis is carried out in a way that the respective monoclonal antibody is tested for binding to human and non-chimpanzee primate cells, e.g. macaque cells, expressing said human and non-chimpanzee primate PSCA, CD19, C-MET, Endosialin, EpCAM, IGF-1R or FAPα antigens, respectively.

### DETAILED DESCRIPTION OF CERTAIN EMBODIMENTS

[0160] Immunoglobulin based multispecific heteromultimer constructs:

[0161] Provided herein are isolated multispecific heteromultimer constructs comprising a first polypeptide construct comprising a first heavy chain polypeptide and a CD3 binding polypeptide construct that binds to a CD3 complex on at least one CD3 expressing cell; and a second polypeptide construct comprising a second heavy chain polypeptide which is different from said first heavy chain polypeptide, and an antigen binding polypeptide construct that binds to a target antigen on at least one B cell, wherein: at least one of said CD3 binding polypeptide construct and said antigen binding polypeptide construct comprises a single chain Fv region; said multispecific heteromultimer construct simultaneously engages said at least one B cell and said at least one CD3 expressing cell such that the CD3 expressing cell is activated, thereby inducing killing of the B cell; and said first and second heavy chain polypeptides form a heterodimeric Fc region comprising a variant immunoglobulin CH3 region comprising at least one amino acid mutation that promotes the formation of said heterodimeric Fc which is formed with stability at least comparable to a native homodimeric Fc, and with purity such that when said multispecific heteromultimer construct is expressed from a mammalian cell in an expression product, said expression product comprises at least about 70% of said multispecific heteromultimer, and less than 10% monomers or homodimers of said first or second polypeptide constructs. In some embodiments, the expression product comprises at least about 75% of said multispecific heteromultimer, and less than 15% monomers or homodimers of said first or second polypeptide constructs. In certain embodiments, the expression product comprises at least about 80% of said multispecific heteromultimer, and less than 10% monomers or homodimers of said first or second polypeptide constructs. In additional embodiments, the expression product comprises at least about 85% of said multispecific heteromultimer, and less than 10% monomers or homodimers of said first or second polypeptide constructs. In a further embodiment expression product comprises at least about 90% of said multispecific heteromultimer, and less than 10% monomers or homodimers of said first or second polypeptide constructs.

[0162] In certain embodiments is the isolated multispecific heteromultimer construct, wherein said first or second polypeptide construct is devoid of at least one of immunoglobulin light chain, and immunoglobulin first constant (CH1) region.

[0163] In certain embodiments is provided an isolated multispecific heteromultimer construct comprising: a first polypeptide construct comprising a first heavy chain polypeptide and a CD3 binding polypeptide construct that binds to a CD3 complex on at least one CD3 expressing cell; a second polypeptide construct comprising a second heavy chain polypeptide which is different from said first heavy chain polypeptide, and wherein said second polypeptide construct does not comprise an antigen binding polypeptide construct that binds to a target antigen on a B cell; wherein: said multispecific heteromultimer construct simultaneously engages at least one B cell and said at least one CD3 expressing cell such that the CD3 expressing cell is activated, thereby inducing killing of the B cell; and said first and second heavy chain polypeptides form a heterodimeric Fc region comprising a variant immunoglobulin CH3 region comprising at least one amino acid mutation that promotes the formation of said heterodimeric Fc, wherein: said heterodimeric Fc is formed with stability at least comparable to a native homodimeric Fc, and said heterodimeric Fc is formed with purity such that when said multispecific heteromultimer construct is expressed from a stable mammalian cell in an expression product, said expression product comprises at least about 75% of said multispecific heteromultimer, and less than 10% monomers or homodimers of said first or second polypeptide constructs. In some embodiments, the heterodimeric Fc interacts with cell surface receptors such as FcgRIIb on the B-cell. In certain embodiment, the heterodimeric Fc is engineered to interact preferentially with the FcgRIIb receptor relative to the normal antibody.

[0164] Provided herein is an isolated multispecific heteromultimer construct comprising: a first polypeptide construct comprising a first heavy chain polypeptide and a CD3 binding polypeptide construct that binds to a CD3 complex on at least one CD3 expressing cell; a second polypeptide construct comprising a second heavy chain polypeptide which is different from said first heavy chain polypeptide, and a steric modulator construct which exhibits negligible receptor binding; wherein: said multispecific heteromultimer construct simultaneously engages at least one B cell and said at least one CD3 expressing cell such that the CD3 expressing cell is activated, thereby inducing killing of the B cell; and said first and second heavy chain polypeptides form a heterodimeric Fc region comprising a variant immunoglobulin CH3 region comprising at least one amino acid mutation that promotes the formation of said heterodimeric Fc, wherein: said heterodimeric Fc is formed with stability at least comparable to a native homodimeric Fc, and said heterodimeric Fc is formed with purity such that when said multispecific heteromultimer construct is coexpressed from a stable mammalian cell in an expression product, said expression product comprises at least about 75% of said multispecific heteromultimer, and less than 10% monomers or homodimers of said first or second polypeptide constructs. In certain embodiment the steric modulator construct is actually incapable of binding any known target tissue or cell surface and thus functions as a dummy polypeptide arm that only plays a steric modulation role in the interactions of the multispecific heteromultimer construct. In some embodiments, the steric modulator construct is a polypeptide sequence that helps modulate sterical features of the multispecific heteromultimer as the multimer binds to T and/or B cells. In certain embodiments the steric modulator construct comprises a polypeptide domain that is designed de-novo. In certain embodiments, the steric modulator construct comprises polypeptide domains obtained by engineering a known polypeptide domain to remove its binding properties. For instance, in certain embodiments, the steric modulator construct comprises an engineered Fab region or fragment thereof which is engineered to remove binding properties.

[0165] Provided is an isolated multispecific heteromultimer construct comprising: a first polypeptide construct comprising a first heavy chain polypeptide and a CD3 binding polypeptide construct that binds to a CD3 complex on at least one CD3 expressing cell; a second polypeptide construct comprising a second heavy chain polypeptide which is different from said first heavy chain polypeptide, and wherein said second polypeptide construct does not comprise an antigen binding polypeptide construct; wherein: said multispecific heteromultimer construct simultaneously engages at least one B cell and said at least one CD3 expressing cell such that the CD3 expressing cell is activated, thereby inducing killing of the B cell; and said first and second heavy chain polypeptides form a heterodimeric Fc region comprising a variant immunoglobulin CH3 region comprising at least one amino acid mutation that promotes the formation of said heterodimeric Fc, wherein: said heterodimeric Fc is formed with stability at least comparable to a native homodimeric Fc, and said heterodimeric Fc is formed with purity such that when said multispecific heteromultimer construct is coexpressed from a stable mammalian cell in an expression product, said expression product comprises at least about 75% of said multispecific heteromultimer, and less than 10% monomers or homodimers of said first or second polypeptide constructs.

[0166] In some embodiments is the isolated multispecific heteromultimer construct described herein wherein the heterodimer Fc region comprises a variant CH2 domain or hinge comprising amino acid modifications that prevents functionally effective binding to all the Fcgamma receptors.

[0167] Provided are isolated multispecific heteromultimer constructs that bind at least one B cell with a valency greater than one, and simultaneously engage said at least one B cell and at least one CD3 expressing cell such that the CD3 expressing cell is activated, thereby inducing killing of the B cell. In certain embodiments, the multispecific heteromultimer comsprises: a first polypeptide construct comprising a first heavy chain polypeptide and a CD3 binding polypeptide construct that binds to a CD3 complex on at least one CD3 expressing cell; and a second polypeptide construct comprising a second heavy chain polypeptide which is different from said first heavy chain polypeptide, and an antigen binding polypeptide construct that binds to a target antigen on at least one B cell; wherein: at least one of said CD3 binding polypeptide construct and said antigen binding polypeptide construct optionally comprises a single chain Fv region; said first and second heavy chain polypeptides form a heterodimeric Fc region comprising a variant immunoglobulin CH3 region comprising at least one amino acid mutation that promotes the formation of said heterodimeric Fc with stability at least comparable to a native homodimeric Fc, and with purity such that when said multispecific heteromultimer construct is expressed from a mammalian cell in an expression product, said expression product comprises greater than 75% of said multispecific heteromultimer, and less than 10% monomers or homodimers of said first or second polypeptide constructs. The said multispecific heteromultimer construct is capable of interacting with the B-cell via the said antigen binding polypeptide construct on the second heavy chain as well as interaction via the said heterodimeric Fc with FcgRIIb receptors on the B-cell to show valency greater than one during B-cell engagement.

[0168] In certain embodiments is the isolated multispecific heteromultimer described herein, wherein the heterodimer Fc region comprises a variant CH2 domain comprising amino acid modifications to promote selective binding of a Fcgamma receptor.

[0169] In some embodiments is the heteromultimer wherein the variant CH2 domain selectively binds at least one of FcgammaIIIa and FcgammaIIb receptor as compared to wild-type CH2 domain.

[0170] In certain embodiments is an isolated multispecific heteromultimer construct described herein wherein the heterodimer Fc is glycosylated.

[0171] In some embodiments is an isolated multispecific heteromultimer described herein, wherein the heterodimer Fc is afucosylated.

[0172] In certain embodiments is an isolated multispecific heteromultimer construct described herein wherein the heterodimer Fc is aglycosylated.

[0173] Fc region modifications promoting heterodimerization:

[0174] Provided herein are multispecific heteromultimer comstructs that comprise different antigen binding moieties, fused to one or the other of the two subunits of the Fc domain, thus the two subunits of the Fc domain are typically comprised of two non-identical polypeptide chains. To improve the yield and purity of the heteromultimers described herein, the Fc region of the polypeptides is modified to promote the association of the desired polypeptides.

[0175] In some embodiments, the first and second heavy chain polypeptides of the heteromultimer constructs described herein form a heterodimeric Fc region comprising a variant immunoglobulin CH3 region comprising at least one amino acid mutation that promotes the formation of said heterodimeric Fc which is formed with stability at least comparable to a native homodimeric Fc, and with purity such that when said multispecific heteromultimer construct is coexpressed from a mammalian cell as an expression product, said expression product comprises at least about 75% of said multispecific heteromultimer, and less than 10% monomers or homodimers of said first or second polypeptide constructs.

[0176] In some embodiments, the first and second heavy chain polypeptides of the heteromultimer constructs described herein form a heterodimeric Fc region comprising a variant immunoglobulin CH3 region comprising at least one amino acid mutation that promotes the formation of said heterodimeric Fc which is formed with stability at least comparable to a native homodimeric Fc, and with purity such that when said multispecific heteromultimer construct is co-expressed from a mammalian cell as an expression product, said expression product comprises at least about 90% of said multispecific heteromultimer, and less than 10% monomers or homodimers of said first or second polypeptide constructs.

[0177] In some embodiments, the first and second heavy chain polypeptides of the heteromultimer constructs described herein form a heterodimeric Fc region comprising a variant immunoglobulin CH3 region comprising at least one amino acid mutation that promotes the formation of said heterodimeric Fc which is formed with stability at least comparable to a native homodimeric Fc, and with purity such that when said multispecific heteromultimer construct is co-expressed from a mammalian cell as an expression product, said expression product comprises at least about 95% of said multispecific heteromultimer, and less than 10% monomers or homodimers of said first or second polypeptide constructs.

[0178] In some embodiments is the isolated multispecific heteromultimer provided herein, wherein the variant CH3 domain has a melting temperature (Tm) of about 73° C. or greater.

[0179] In certain embodiments is the isolated multispecific heteromultimer described herein, wherein the heterodimer Fc region is formed with a purity greater than about 78%.

[0180] In am embodiment is the isolated multispecific heteromultimer described herein, wherein the heterodimer Fc region is formed with a purity of at least about 78% or greater and the Tm is at least about 75° C.

[0181] In some embodiments is the isolated multispecific heteromultimer described herein, wherein the heterodimer Fc region is formed with a purity of at least about 75% and the Tm is about 75° C. or greater.

[0182] In certain embodiments are provided isolated multispecific heteromultimer constructs wherein: a) the variant CH3 sequence of the first heavy chain polypeptide comprises the amino acid modifications L351Y, F405A, and Y407V, and the variant CH3 sequence of the second transporter polypeptide comprises the amino acid modifications T366L, K392M, and T394W; b) the variant CH3 sequence of the first heavy chain polypeptide comprises the amino acid modifications L351Y, F405A, and Y407V, and the variant CH3 sequence of the second heavy chain polypeptide comprises the amino acid modifications T366L, K392L, and T394W; c) the variant CH3 sequence of the first heavy chain polypeptide comprises the amino acid modifications T350V, L351Y, F405A, and Y407V, and the variant CH3 sequence of the second heavy chain polypeptide comprises the amino acid modifications T350V, T366L, K392M, and T394W; d) the variant CH3 sequence of the first heavy chain polypeptide comprises the amino acid modifications T350V, L351Y, F405A, and Y407V, and the variant CH3 sequence of the second heavy chain polypeptide comprises the amino acid modifications T350V, T366L, K392L, and T394W; e) the variant CH3 sequence of the first heavy chain polypeptide comprises the amino acid modifications T366L, N390R, K392R, and T394W, and the variant CH3 sequence of the second heavy chain polypeptide comprises the amino acid modifications L351Y, S400E, F405A, and Y407V; or f) the variant CH3 sequence of the first heavy chain polypeptide comprises the amino acid modifications T350V, T366L, N390R, K392R, and T394W, and the variant CH3 sequence of the second heavy chain polypeptide comprises the amino acid modifications T350V, L351Y, S400E, F405A, and Y407V.

[0183] Fc region modifications reducing Fc receptor binding and/or effector function:

[0184] In certain embodiments the Fc regions of the heteromultimer constructs described herein comprises a variant CH2 domain comprising amino acid modifications to promote selective binding of a Fcgamma receptor. In some embodiments, the isolated multispecific heteromultimer described herein comprise a variant CH2 domain that selectively binds a FcgammaIIb receptor with an affinity greater than that of the wild-type CH2 domain. In some embodiments, the isolated multispecific heteromultimer described herein comprise a variant CH2 domain that selectively binds a FcgammaIIA and/or FcgammaIIIA receptor with an affinity greater than that of the wild-type CH2 domain.

[0185] In certain embodiments the Fc regions of the heteromultimer constructs described herein exhibit reduced binding affinity to an Fc receptor and/or reduced effector function, as compared to a native IgG1 Fc region. In one such embodiment the Fc region exhibits less than 50%, alternatively less than 20%, alternatively less than 10% and in some embodiments, less than 5% of the binding affinity to an Fc receptor, as compared to a native IgG1 Fc region, and/or less than 50%, alternatively less than 20%, alternatively less than 10% and in some embodiments less than 5% of the effector function, as compared to a native IgG1 Fc region.

[0186] In one embodiment, the Fc region of a heteromutlimer construct described herein does not substantially bind to an Fc receptor or induce appreciable effector function. In a certain embodiment the Fc receptor is an Fcγ receptor. In one embodiment the Fc receptor is a mammalian Fc receptor. In certain embodiments, the mammalian Fc receptor is a human Fc receptor. In one embodiment the Fc receptor is an activating Fc receptor. In a specific embodiment the Fc receptor is an activating human Fcγ receptor, more specifically human FcγRIIIa, FcγRI or FcγRIIa, most specifically human FcγRIIIa. In one embodiment the effector function is one or more function selected from the group consisting of CDC, ADCC, ADCP, and cytokine secretion. In a particular embodiment the effector function is ADCC. In one embodiment the Fc region exhibits binding affinity to neonatal Fc receptor (FcRn). In certain embodiments, the FcRn binding affinity is substantially similar to that of a native IgG1 Fc. In some embodiments, substantially similar binding to FcRn is achieved when the Fc region of a heteromultimer construct described herein exhibits greater than about 70%, or in some embodiments greater than about 80%, and in some particular embodiments greater than about 90% of the binding affinity of a native IgG1 Fc domain to FcRn.

[0187] In certain embodiments the Fc region of a heteromultimer construct described herein is engineered to have reduced binding affinity to an Fc receptor and/or reduced effector function, as compared to a non-engineered Fc domain. In some embodiments, the engineered mutations are present in the lower hinge and CH2 domain. In particular embodiments, the Fc region of a heteromultimer described herein comprises one or more amino acid mutation that reduces the binding affinity of the Fc region to an Fc receptor and/or effector function. In some embodiments, the same one or more amino acid mutation is present in each of the two subunits of the Fc region. In some embodiments, different amino acid mutations are introduced in each of the two subunits of the Fc region. In one embodiment the amino acid mutation reduces the binding affinity of the Fc region to an Fc receptor. In one embodiment the amino acid mutation reduces the binding affinity of the Fc region to an Fc receptor by at least 2-fold, or in some embodiments at least 5-fold, or in an embodiment at least 10-fold. In certain embodiments where there is more than one amino acid mutation that reduces the binding affinity of the Fc region to the Fc receptor, the combination of these amino acid mutations reduces the binding affinity of the Fc region to an Fc receptor by at least 10-fold, or in some embodiments at least 20-fold, or in certain embodiments at least 50-fold. In certain embodiment, the binding affinity of the Fc region for the Fc receptor is reduced to an extent where there is no longer any detectable binding for the mutant Fc for the Fc receptor in standard binding assay such as using the SPR instrument. In one embodiment the heteromultimer construct described herein comprising an engineered Fc domain exhibits less than 20%, and in certain embodiments less than 10%, and in select embodiments less than 5% of the binding affinity to an Fc receptor as compared to a corresponding construct comprising an Fc domain which is not engineered to reduce binding to an Fc receptor. In a particular embodiment the Fc receptor is an Fcγ receptor. In some embodiments the Fc receptor is a human Fc receptor. In some embodiments the Fc receptor is an activating Fc receptor. In a specific embodiment the Fc receptor is an activating human Fcγ receptor which in certain embodiments is one of human FcyRIIIa, FcyRI and FcyRIIa. In some embodiments, binding to each of these receptors is reduced. In some embodiments binding affinity to a complement component, for instance, but not restricted to C1q, is also reduced. In one embodiment binding affinity to neonatal Fc receptor (FcRn) is not reduced. In certain embodiments the Fc region of a heteromultimer described herein is engineered to have reduced effector function, as compared to a non-engineered Fc region. In certain embodiments, the reduced effector function can include, but is not limited to, one or more of the following: reduced complement dependent cytotoxicity (CDC), reduced antibody-dependent cell-mediated cytotoxicity (ADCC), reduced antibody-dependent cellular phagocytosis (ADCP), reduced cytokine secretion, reduced immune complex-mediated antigen uptake by antigen-presenting cells, reduced binding to NK cells, reduced binding to macrophages, reduced binding to monocytes, reduced binding to polymorphonuclear cells, reduced direct signaling inducing apoptosis, reduced crosslinking of target-bound antibodies, reduced dendritic cell maturation, or reduced T cell priming. In one embodiment the reduced effector function is one or more selected from the group of reduced CDC, reduced ADCC, reduced ADCP, and reduced cytokine secretion. In certain embodiments the reduced effector function is reduced ADCC. In one embodiment the reduced ADCC is less than 20% of the ADCC induced by a non-engineered Fc domain (or a T cell activating bispecific antigen binding molecule comprising a non-engineered Fc domain). In another embodiment the reduced ADCC is less than 50% of the ADCC induced by a non-engineered Fc domain (or a T cell activating bispecific antigen binding molecule comprising a non-engineered Fc domain). In a further embodiment the reduced ADCC is less than 10% of the ADCC induced by a non-engineered Fc domain (or a T cell activating bispecific antigen binding molecule comprising a non-engineered Fc domain).

[0188] In certain embodiments is the isolated multispecific heteromultimer described herein wherein the heterodimer Fc region comprises a variant CH2 domain comprising amino acid modifications to promote selective binding of a Fcgamma receptor as described herein.

[0189] In some embodiments is an isolated multispecific heteromultimer described herein, wherein the variant CH2 domain selectively binds at least one of FcgammaIIIa and FcgammaIIb receptor as compared to wild-type CH2 domain.

[0190] In certain embodiments the multispecific heteromultimer construct comprises a variant CH2 region that binds at least one B cell such that the heteromultimer construct binds B cells with a valency greater than one.

[0191] Albumin-based multispecific heteromultimer constructs:

[0192] Provided are isolated multispecific heteromultimer constructs comprising: a first polypeptide construct comprising a first transporter polypeptide fused to at least one CD3 binding polypeptide construct that binds to a CD3 complex on at least one CD3 expressing cell; a second polypeptide construct comprising a second transporter polypeptide which is different from said first transporter polypeptide, fused to at least one antigen binding polypeptide construct that binds to a target antigen on at least one B cell; wherein said first and second transporter polypeptides are derived from a protein by segmentation of said protein, each transporter polypeptide comprising an amino acid sequence with at least 90% identity to a segment of said protein, and wherein said transporter polypeptides self-assemble to form a quasi-native structure of said monomeric protein. In some embodiments, each transporter polypeptide comprises an amino acid sequence with at least 85% identity to a segment of the protein. In some embodiments, each transporter polypeptide comprises an amino acid sequence with at least 80% identity to a segment of the protein. In some embodiments, each transporter polypeptide comprises an amino acid sequence with at least 95% identity to a segment of the protein. In some other embodiments, each transporter polypeptide comprises an amino acid sequence with at least 99% identity to a segment of the protein.

[0193] In certain embodiments is the isolated multispecific heteromultimer described herein, wherein said transporter polypeptides are not derived from an antibody. In a further embodiment is an isolated multispecific heteromultimer described herein, wherein each transporter polypeptide is an albumin derivative. In some embodiments is an albumin based isolated multispecific heteromultimer, wherein said albumin is human serum albumin. In some embodiments, at least one transporter polypeptide is an allo-albumin derivative. In certain embodiments is an isolated multispecific heteromultimer described herein wherein each transporter polypeptide is derived from a different alloalbumin. In some embodiments, each transporter polypeptide comprises an amino acid sequence with at least 75% identity to a segment of albumin. In some embodiments, each transporter polypeptide comprises an amino acid sequence with at least 80% identity to a segment of albumin. In some embodiments, each transporter polypeptide comprises an amino acid sequence with at least 90% identity to a segment of albumin. In some other embodiments, each transporter polypeptide comprises an amino acid sequence with at least 95% identity to a segment of albumin. In some other embodiments, each transporter polypeptide comprises an amino acid sequence with at least 99% identity to a segment of albumin.

[0194] Provided herein is an albumin based isolated multispecific heteromultimer construct comprising: a first monomer comprising a first transporter polypeptide fused to at least one CD3 binding polypeptide construct that binds to a CD3 complex on at least one CD3 expressing cell; a second polypeptide construct comprising a second transporter polypeptide which is different from said first transporter polypeptide, fused to at least one antigen binding polypeptide construct that binds to a target antigen on at least one B cell; wherein said first and second transporter polypeptides are obtained by segmentation of albumin, and each transporter polypeptide comprising an amino acid sequence with at least 90% identity to a segment of albumin such that said transporter polypeptides self-assemble to form quasi-native albumin, and wherein said first cargo polypeptide does not have any binding domain present in said second cargo polypeptide.

[0195] Provided herein are albumin based multispecific heteromultimer constructs as described above, wherein said first transporter polypeptide comprising at least one mutation selected from A194C, L198C, W214C, A217C, L331C and A335C. In certain embodiments, the second transporter polypeptide comprises at least one mutation selected from L331C, A335C, V343C, L346C, A350C, V455C, and N458C.

[0196] Provided are isolated multispecific heteromultimer constructs described herein wherein said multispecific heteromultimer construct simultaneously engages said at least one B cell and said at least one CD3 expressing cell such that the CD3 expressing cell is activated, thereby inducing killing of the B cell.

[0197] In certain embodiments, are provided heteromultimer constructs comprising transporter polypeptides derived from albumin that self-assemble to form a heteromultimer that exhibits native albumin like functional characteristics such as FcRn binding and structural characteristics. In certain embodiments, the albumin based heteromultimer constructs described herein when administered to a person in need, home to tumor cells. In some embodiments, the tumor cells are from a solid tumor. In some embodiments, the heteromultimer constructs described herein home to tumor cells and subsequently bind to said tumor cells. In certain embodiments, the heteromultimer constructs described herein home to at least one tumor cell, bind simultaneously to said at least one tumor cell and at least one T-cell in a manner that results in the lysis of said tumor cell. In certain embodiments, the heteromultimer constructs described herein home to at least one tumor cell, bind simultaneously to said at least one tumor cell and at least one T-cell such that the binding to said tumor cell is with a higher valency than the binding to said T-cell, and causes the lysis of said tumor cell.

[0198] CD3 Complex Binding Polypeptide Constructs:

[0199] In certain embodiments of the immunoglobulin-based and albumin-based multispecific heteromultimer constructs provided herein, said heteromultimer construct comprises at least one CD3 binding polypeptide construct that binds to a CD3 complex on at least one CD3 expressing cell. In some embodiments, the at least one CD3 binding polypeptide construct comprises at least one CD3 binding domain from a CD3 specific antibody, a nanobody, fibronectin, affibody, anticalin, cysteine knot protein, DARPin, avimer, Kunitz domain or variant or derivative thereof. In some embodiments, the at least one CD3 binding domain comprises at least one amino acid modification that reduces immunogenicity as compared to a corresponding CD3 binding domain not comprising said modification. In an embodiment, the at least one CD3 binding domain comprises at least one amino acid modification that increases its stability as measured by Tₘ, as compared to a corresponding CD3 binding domain not comprising said modification. In some embodiments, there is about a 3 degree increase in the Tₘ as compared to the native CD3 binding domain not comprising said at least one modification. In some embodiments, there is about a 5 degree increase in the Tₘ as compared to the native CD3 binding domain not comprising said at least one modification. In some embodiments, there is about a 8 degree increase in the Tₘ as compared to the native CD3 binding domain not comprising said at least one modification. In some embodiments, there is about a 10 degree increase in the Tₘ as compared to the native CD3 binding domain not comprising said at least one modification.

[0200] In some embodiments, the at least one CD3 binding polypeptide construct described herein comprises at least one CD3 binding domain from a CD3 specific antibody wherein said CD3 specific antibody is a heavy chain antibody devoid of light chains.

[0201] In certain other embodiments, the at least one CD3 binding polypeptide construct described herein comprises at least one CD3 binding domain derived from a non-antibody protein scaffold domain.

[0202] In certain embodiments, the CD3 binding polypeptide constructs are CD3 binding Fab constructs (i.e. antigen binding constructs comprising a heavy and a light chain, each comprising a variable and a constant region). In some embodiment said Fab construct is mammalian. In one embodiment said Fab construct is human. In another embodiment said Fab construct is humanized. In yet another embodiment said Fab contruct comprises at least one of human heavy and light chain constant regions. In a further embodiment said Fab construct is a single chain Fab (scFab).

[0203] In certain embodiments the CD3 binding polypeptide constructs comprise CD3 binding scFab constructs wherein the C-terminus of the Fab light chain is connected to the N-terminus of the Fab heavy chain by a peptide linker. The peptide linker allows arrangement of the Fab heavy and light chain to form a functional CD3 binding moiety. In certain embodiments, the peptide linkers suitable for connecting the Fab heavy and light chain include sequences comprising glycine-serine linkers for instance, but not limited to (GₘS)ₙ-GG, (SGₙ)ₘ, (SEGₙ)ₘ, wherein m and n are between 0-20. In certain embodiments, the scFab construct is a cross-over construct wherein the constant regions of the Fab light chain and the Fab heavy chain are exchanged. In another embodiment of a cross-over Fab, the variable regions of the Fab light chain and the Fab heavy chain are exchanged.

[0204] In certain embodiments, the CD3 binding polypeptide constructs comprise CD3 binding Fv constructs (i.e. antigen binding constructs comprising a heavy and a light chain, each comprising a variable region). In some embodiment said Fv construct is mammalian. In one embodiment said Fv construct is human. In another embodiment said Fv construct is humanized. In yet another embodiment said Fv contruct comprises at least one of human heavy and light chain variable regions. In a further embodiment said Fv construct is a single chain Fv (scFv).

[0205] In some embodiments, the CD3 binding polypeptide construct of a multispecific heteromultimer construct described herein bind to at least one component of the CD3 complex. In a specific embodiment, the CD3 binding polypeptide construct binds to at least one of CD3 epsilon, CD3 gamma, CD3 delta or CD3 zeta of the CD3 complex. In certain embodiments, the CD3 binding polypeptide construct binds the CD3epsilon domain. In certain embodiments, binding polypeptide construct binds a human CD3 complex. In certain embodiments, the CD3 binding polypeptide construct exhibits cross-species binding to a least one member of the CD3 complex.

[0206] Provided herein are immunoglobulin-based and albumin-based multispecific heteromultimer constructs comprising at least one CD3 binding polypeptide construct that binds to a CD3 complex on at least one CD3 expressing cell, where in the CD3 expressing cell is a T-cell. In certain embodiments, the CD3 expressing cell is a human cell. In some embodiments, the CD3 expressing cell is a non-human, mammalian cell. In some embodiments, the T cell is a cytotoxic T cell. In some embodiments the T cell is a CD4⁺ or a CD8⁺ T cell.

[0207] In certain embodiments of the immunoglobulin-based and albumin-based multispecific heteromultimer constructs provided herein, the construct is capable of activating and redirecting cytotoxic activity of a T cell to a target cell such as a B cell. In a particular embodiment, said redirection is independent of MHC-mediated peptide antigen presentation by the target cell and and/or specificity of the T cell.

[0208] Provided herein are hetromultimer constructs that are capable of simultaneous binding to a B cell antigen for instance a tumor cell antigen, and an activating T cell antigen. In one embodiment, the heteromultimer construct is capable of crosslinking a T cell and a target B cell by simultaneous binding to a B cell antigen for instance CD19 or CD20 and an activating T cell antigen for instance CD3. In one embodiment, the simultaneous binding results in lysis of a target B cell, for instance a tumor cell. In one embodiment, such simultaneous binding results in activation of the T cell. In other embodiments, such simultaneous binding results in a cellular response of a T lymphocyte, for instance a cytotoxic T lymphocyte, selected from the group of: proliferation, differentiation, cytokine secretion, cytotoxic effector molecule release, cytotoxic activity, and expression of activation markers. In one embodiment, binding of the T cell activating bispecific antigen binding molecule to the activating T cell antigen without simultaneous binding to the target cell antigen does not result in T cell activation.

[0209] B Cell Binding Polypeptide Constructs:

[0210] Provided herein are isolated heteromultimer constructs comprising at least one antigen binding polypeptide construct that binds to a target antigen on at least one B cell. In certain embodiments, the antigen binding polypeptide construct binds at least one member of a B cell CD21-CD19-CD81 complex. In some embodiments, the antigen binding polypeptide construct comprises at least one CD19 binding domain or fragment thereof. In an embodiment, the antigen binding polypeptide construct comprises at least one CD20 binding domain.

[0211] In some embodiments, the at least one antigen binding domain is a CD19 or CD20 binding domain which is obtained from a CD19 or CD20 specific antibody, a nanobody, fibronectin, affibody, anticalin, cysteine knot protein, DARPin, avimer, Kunitz domain or variant or derivative thereof. In some embodiments, the at least one antigen binding polypeptide construct described herein comprises at least one antigen binding domain which is a CD19 or CD20 binding domain from an antibody which is a heavy chain antibody devoid of light chains.

[0212] In some embodiments, the at least one antigen binding domain is a CD19 or CD20 binding domain that comprises at least one amino acid modification that reduces immunogenicity as compared to a corresponding antigen binding domain not comprising said modification. In an embodiment, the at least one antigen binding domain is a CD19 or CD20 binding domain comprising at least one amino acid modification that increases its stability as measured by Tₘ, as compared to a corresponding domain not comprising said modification.

[0213] In certain embodiments, the at least one antigen binding polypeptide construct is a Fab construct that binds at least one of CD19 and CD20 on a B cell. In some embodiment said Fab construct is mammalian. In one embodiment said Fab construct is human. In another embodiment said Fab construct is humanized. In yet another embodiment said Fab contruct comprises at least one of human heavy and light chain constant regions. In a further embodiment said Fab construct is a single chain Fab (scFab).

[0214] In certain embodiments the CD19 and/or CD20 binding polypeptide construct comprises a scFab construct wherein the C-terminus of the Fab light chain is connected to the N-terminus of the Fab heavy chain by a peptide linker. The peptide linker allows arrangement of the Fab heavy and light chain to form a functional CD19 and/or CD20 binding moiety. In certain embodiments, the peptide linkers suitable for connecting the Fab heavy and light chain include sequences comprising glycine-serine linkers for instance, but not limited to (GₘS)ₙ-GG, (SGₙ)ₘ, (SEGₙ)ₘ, wherein m and n are between 0-20. In certain embodiments, the scFab construct is a cross-over construct wherein the constant regions of the Fab light chain and the Fab heavy chain are exchanged. In another embodiment of a cross-over Fab, the variable regions of the Fab light chain and the Fab heavy chain are exchanged.

[0215] In certain embodiments, the at least one antigen binding polypeptide construct is a Fv construct that binds at least one of CD19 and CD20 on a B cell. In some embodiment said Fv construct is mammalian. In one embodiment said Fv construct is human. In another embodiment said Fv construct is humanized. In yet another embodiment said Fv contruct comprises at least one of human heavy and light chain variable regions. In a further embodiment said Fv construct is a single chain Fv (scFv).

[0216] In certain embodiments, the antigen binding polypeptide construct exhibits cross-species binding to a least one antigen expressed on the surface of a B cell. In some embodiments, the antigen binding polypeptide construct of a multispecific heteromultimer construct described herein bind to at least one of mammalian CD19 and CD20. In certain embodiments, binding polypeptide construct binds a human CD19 or CD20.

[0217] Provided herein are hetromultimer constructs that are capable of simultaneous binding to a B cell antigen for instance a tumor cell antigen, and an activating T cell antigen. In one embodiment, the heteromultimer construct is capable of crosslinking a T cell and a target B cell by simultaneous binding to a B cell antigen for instance CD19 or CD20 and an activating T cell antigen for instance CD3.

[0218] In certain embodiments, a heteromultimer described herein comprises at least one antigen binding polypeptide construct that binds to a target antigen such as a CD19 or CD20 on at least one B cell associated with a disease. In some embodiments, the disease is a cancer selected from a carcinoma, a sarcoma, leukaemia, lymphoma and glioma. In an embodiment, the cancer is at least one of squamous cell carcinoma, adenocarcinoma, transition cell carcinoma, osteosarcoma and soft tissue sarcoma. In certain embodiments, the at least one B cell is an autoimmune reactive cell that is a lymphoid or myeloid cell.

[0219] Additional Antigen Binding Constructs:

[0220] In certain embodiments, an albumin or immunoglobulin based multispecific heteromultimer construct described herein further comprises at least one binding domain that binds at least one of: EpCAM, EGFR, IGFR, HER-2 neu, HER-3, HER-4, PSMA, CEA, MUC-1 (mucin), MUC2, MUC3, MUC4, MUC5, MUC7, CCR4, CCR5, CD19, CD20, CD33, CD30, ganglioside GD3, 9-O-Acetyl-GD3, GM2, Poly SA, GD2, Carboanhydrase IX (MN/CA IX), CD44v6, Sonic Hedgehog (Shh), Wue-1, Plasma Cell Antigen, (membrane-bound), Melanoma Chondroitin Sulfate Proteoglycan (MCSP), CCR8, TNF-alpha precursor, STEAP, mesothelin, A33 Antigen, Prostate Stem Cell Antigen (PSCA), Ly-6; desmoglein 4, E-cadherin neoepitope, Fetal Acetylcholine Receptor, CD25, CA19-9 marker, CA-125 marker and Muellerian Inhibitory Substance (MIS) Receptor type II, sTn (sialylated Tn antigen; TAG-72), FAP (fibroblast activation antigen), endosialin, LG, SAS, EPHA4 CD63, CD3 BsAb immunocytokines TNF which comprise a CD3 antibody attached to the cytokine, IFNγ, IL-2, and TRAIL.

[0221] Post Translational Modifications:

[0222] In certain embodiments are multispecific heteromultimer constructs described herein, which are differentially modified during or after translation. In some embodiments, the modification is at least one of: glycosylation, acetylation, phosphorylation, amidation, derivatization by known protecting/blocking groups, proteolytic cleavage and linkage to an antibody molecule or other cellular ligand. In some embodiments, the heteromultimer construct is chemically modified by known techniques, including but not limited, to specific chemical cleavage by cyanogen bromide, trypsin, chymotrypsin, papain, V8 protease, NaBH₄; acetylation, formylation, oxidation, reduction; and metabolic synthesis in the presence of tunicamycin.

[0223] Additional post-translational modifications of heteromultimers described herein include, for example, N-linked or O-linked carbohydrate chains, processing of N-terminal or C-terminal ends), attachment of chemical moieties to the amino acid backbone, chemical modifications of N-linked or O-linked carbohydrate chains, and addition or deletion of an N-terminal methionine residue as a result of procaryotic host cell expression. The heteromultimer constructs described herein are modified with a detectable label, such as an enzymatic, fluorescent, isotopic or affinity label to allow for detection and isolation of the protein. In certain embodiments, examples of suitable enzyme labels include horseradish peroxidase, alkaline phosphatase, beta-galactosidase, or acetylcholinesterase; examples of suitable prosthetic group complexes include streptavidin biotin and avidin/biotin; examples of suitable fluorescent materials include umbelliferone, fluorescein, fluorescein isothiocyanate, rhodamine, dichlorotriazinylamine fluorescein, dansyl chloride or phycoerythrin; an example of a luminescent material includes luminol; examples of bioluminescent materials include luciferase, luciferin, and aequorin; and examples of suitable radioactive material include iodine, carbon, sulfur, tritium, indium, technetium, thallium, gallium, palladium, molybdenum, xenon, fluorine.

[0224] In specific embodiments, heteromultimer constructs described herein are attached to macrocyclic chelators that associate with radiometal ions.

[0225] In some embodiments, the heteromultimer constructs described herein are modified by either natural processes, such as post-translational processing, or by chemical modification techniques which are well known in the art. In certain embodiments, the same type of modification may be present in the same or varying degrees at several sites in a given polypeptide. In certain embodiments, polypeptides from heteromultimers described herein are branched, for example, as a result of ubiquitination, and in some embodiments are cyclic, with or without branching. Cyclic, branched, and branched cyclic polypeptides are a result from posttranslation natural processes or made by synthetic methods. Modifications include acetylation, acylation, ADP-ribosylation, amidation, covalent attachment of flavin, covalent attachment of a heme moiety, covalent attachment of a nucleotide or nucleotide derivative, covalent attachment of a lipid or lipid derivative, covalent attachment of phosphotidylinositol, cross-linking, cyclization, disulfide bond formation, demethylation, formation of covalent cross-links, formation of cysteine, formation of pyroglutamate, formylation, gamma-carboxylation, glycosylation, GPI anchor formation, hydroxylation, iodination, methylation, myristylation, oxidation, pegylation, proteolytic processing, phosphorylation, prenylation, racemization, selenoylation, sulfation, transfer-RNA mediated addition of amino acids to proteins such as arginylation, and ubiquitination. (See, for instance, PROTEINS—STRUCTURE AND MOLECULAR PROPERTIES, 2nd Ed., T. E. Creighton, W. H. Freeman and Company, New York (1993); POST-TRANSLATIONAL COVALENT MODIFICATION OF PROTEINS, B. C. Johnson, Ed., Academic Press, New York, pgs. 1-12 (1983); Seifter et al., Meth. Enzymol. 182:626-646 (1990); Rattan et al., Ann. N.Y. Acad. Sci. 663:48-62 (1992)).

[0226] In certain embodiments, heteromultimeric constructs described herein are attached to solid supports, which are particularly useful for immunoassays or purification of polypeptides that are bound by, that bind to, or associate with albumin fusion proteins of the invention. Such solid supports include, but are not limited to, glass, cellulose, polyacrylamide, nylon, polystyrene, polyvinyl chloride or polypropylene.

[0227] Polynucleotides:

[0228] Provided herein are polynucleotide constructs encoding multispecific heteromultimer constructs described herein. In certain embodiments the polynucleotide or nucleic acid is DNA. In other embodiments, a polynucleotide described herein is RNA, for example, in the form of messenger RNA (mRNA). RNA of the present invention may be single stranded or double stranded.

[0229] In certain embodiments is a set of expression vectors for expressing a multispecific heteromultimer construct described herein which comprises a first and a second polypeptide construct, said set comprising at least a first DNA sequence encoding said first polypeptide construct and at least a second DNA sequence encoding said second polypeptide construct.

[0230] In certain embodiments are polynucleotide sequences encoding a heteromultimer construct described herein or a polypeptide construct thereof with sequence as provided herein. In certain embodiments is a polynucleotide comprising a sequence that is at least about 80%, 85%, 90%, 95%, 96%, 97%, 98%, or 99% identical to a nucleotide sequence shown in Figure. In certain embodiments are polynucleotide sequences encoding a heteromultimer construct described herein or a polypeptide construct thereof, wherein said polynucleotide comprises conservative mutations of the sequence as provided herein.

[0231] Methods of Recombinant and Synthetic Production of Multispecific Heteromultimer Constructs:

[0232] Provided are methods of producing an expression product containing a multispecific heteromultimer construct as described herein, in stable mammalian cells, the method comprising: transfecting at least one mammalian cell with: at least a first DNA sequence encoding said first polypeptide construct and at least a second DNA sequence encoding said second polypeptide construct, such that said at least one first DNA sequence, said at least one second DNA sequence are transfected in said at least one mammalian cell in a pre-determined ratio to generate stable mammalian cells; culturing said stable mammalian cells to produce said expression product comprising said multispecific heteromultimer. In certain embodiments, said predetermined ratio of the at least one first DNA sequence: at least one second DNA sequence is about 1:1. In certain other embodiments, said predetermined ratio of the at least one first DNA sequence: at least one second DNA sequence is skewed towards a larger amount of the one first DNA sequence such as about 2:1. In yet other embodiments, said predetermined ratio of the at least one first DNA sequence: at least one second DNA sequence is skewed towards a larger amount of the one first DNA sequence such as about 1:2. In select embodiments, the mammalian cell is selected from the group consisting of a VERO, HeLa, HEK, NS0, Chinese Hamster Ovary (CHO), W138, BHK, COS-7, Caco-2 and MDCK cell, and subclasses and variants thereof.

[0233] In certain embodiments are heteromultimers produced as recombinant molecules by secretion from yeast, a microorganism such as a bacterium, or a human or animal cell line. In embodiments, the polypeptides are secreted from the host cells.

[0234] Embodiments include a cell, such as a yeast cell transformed to express a heteromultimer protein described herein. In addition to the transformed host cells themselves, are provided culture of those cells, preferably a monoclonal (clonally homogeneous) culture, or a culture derived from a monoclonal culture, in a nutrient medium. If the polypeptide is secreted, the medium will contain the polypeptide, with the cells, or without the cells if they have been filtered or centrifuged away. Many expression systems are known and may be used, including bacteria (for example E. coli and Bacillus subtilis), yeasts (for example Saccharomyces cerevisiae, Kluyveromyces lactis and Pichia pastoris, filamentous fungi (for example Aspergillus), plant cells, animal cells and insect cells.

[0235] A heteromultimer described herein is produced in conventional ways, for example from a coding sequence inserted in the host chromosome or on a free plasmid. The yeasts are transformed with a coding sequence for the desired protein in any of the usual ways, for example electroporation. Methods for transformation of yeast by electroporation are disclosed in Becker & Guarente (1990) Methods Enzymol. 194, 182.

[0236] Successfully transformed cells, i.e., cells that contain a DNA construct of the present invention, can be identified by well known techniques. For example, cells resulting from the introduction of an expression construct can be grown to produce the desired polypeptide. Cells can be harvested and lysed and their DNA content examined for the presence of the DNA using a method such as that described by Southern (1975) J. Mol. Biol. 98, 503 or Berent et al. (1985) Biotech. 3, 208. Alternatively, the presence of the protein in the supernatant can be detected using antibodies.

[0237] Useful yeast plasmid vectors include pRS403-406 and pRS413-416 and are generally available from Stratagene Cloning Systems, La Jolla, Calif. 92037, USA. Plasmids pRS403, pRS404, pRS405 and pRS406 are Yeast Integrating plasmids (Ylps) and incorporate the yeast selectable markers HIS3, 7RP1, LEU2 and URA3. Plasmids pRS413-416 are Yeast Centromere plasmids (Ycps).

[0238] A variety of methods have been developed to operably link DNA to vectors via complementary cohesive termini. For instance, complementary homopolymer tracts can be added to the DNA segment to be inserted to the vector DNA. The vector and DNA segment are then joined by hydrogen bonding between the complementary honmopolymeric tails to form recombinant DNA molecules.

[0239] Synthetic linkers containing one or more restriction sites provide an alternative method of joining the DNA segment to vectors. The DNA segment, generated by endonuclease restriction digestion, is treated with bacteriophage T4 DNA polymerase or E. coli DNA polymerase 1, enzymes that remove protruding, _single-stranded termini with their 3′ 5′-exonucleolytic activities, and fill in recessed 3′-ends with their polymerizing activities.

[0240] The combination of these activities therefore generates blunt-ended DNA segments. The blunt-ended segments are then incubated with a large molar excess of linker molecules in the presence of an enzyme that is able to catalyze the ligation of blunt-ended DNA molecules, such as bacteriophage T4 DNA ligase. Thus, the products of the reaction are DNA segments carrying polymeric linker sequences at their ends. These DNA segments are then cleaved with the appropriate restriction enzyme and ligated to an expression vector that has been cleaved with an enzyme that produces termini compatible with those of the DNA segment.

[0241] Synthetic linkers containing a variety of restriction endonuclease sites are commercially available from a number of sources including International Biotechnologies Inc, New Haven, Conn., USA.

[0242] Exemplary genera of yeast contemplated to be useful in the practice of the present invention as hosts for expressing the albumin, fusion proteins are Pichua (formerly classified as Hansenula), Saccharomyces, Kluyveromyces, Aspergillus, Candida, Torulopsis, Torulaspora, Schizosaccharomyces, Citeromyces, Pachysolen, Zygosaccharomyces, Debaromyces, Trichoderma, Cephalosporium, Humicola, Mucor, Neurospora, Yarrowia, Metschunikowia, Rhodosporidium, Leucosporidium, Botryoascus, Sporidiobolus, Endomycopsis, and the like. Preferred genera are those selected from the group consisting of Saccharomyces, Schizosaccharomyces, Kluyveromyces, Pichia and Torulaspora. Examples of Saccharomyces spp. are S. cerevisiae, S. italicus and S. rouxii.

[0243] Examples of Kluyveromyces spp. are K. fragilis, K. lactis and K. marxianus. A suitable Torulaspora species is T. delbrueckii. Examples of Pichia (Hansenula) spp. are P. angusta (formerly H. polymorpha), P. anomala (formerly H. anomala) and P. pastoris. Methods for the transformation of S. cerevisiae are taught generally in EP 251 744, EP 258 067 and WO 90/01063, all of which are incorporated herein by reference.

[0244] Exemplary species of Saccharomyces useful for the synthesis of heteromultimer constructs described herein include S. cerevisiae, S. italicus, S. diastaticus, and Zygosaccharomyces rouxii. Preferred exemplary species of Kluyveromyces include K. fragilis and K. lactis. Preferred exemplary species of Hansenula include H. polymorpha (now Pichia angusta), H. anomala (now Pichia anomala), and Pichia capsulata. Additional preferred exemplary species of Pichia include P. pastoris. Preferred exemplary species of Aspergillus include A. niger and A. nidulans. Preferred exemplary species of Yarrowia include Y. lipolytica. Many preferred yeast species are available from the ATCC. For example, the following preferred yeast species are available from the ATCC and are useful in the expression of albumin fusion proteins: Saccharomyces cerevisiae, Hansen, teleomorph strain BY4743 yap3 mutant (ATCC Accession No. 4022731); Saccharomyces cerevisiae Hansen, teleomorph strain BY4743 hsp150 mutant (ATCC Accession No. 4021266); Saccharomyces cerevisiae Hansen, teleomorph strain BY4743 pmt1 mutant (ATCC Accession No. 4023792); Saccharomyces cerevisiae Hansen, teleomorph (ATCC Accession Nos. 20626; 44773; 44774; and 62995); Saccharomyces diastaticus Andrews et Gilliland ex van der Walt, teleomorph (ATCC Accession No. 62987); Kluyveromyces lactis (Dombrowski) van der Walt, teleomorph (ATCC Accession No. 76492); Pichia angusta (Teunisson et al.) Kurtzman, teleomorph deposited as Hansenula polymorpha de Morais et Maia, teleomorph (ATCC Accession No. 26012); Aspergillus niger van Tieghem, anamorph (ATCC Accession No. 9029); Aspergillus niger van Tieghem, anamorph (ATCC Accession No. 16404); Aspergillus nidulans (Eidam) Winter, anamorph (ATCC Accession No. 48756); and Yarrowia lipolytica (Wickerham et al.) van der Walt et von Arx, teleomorph (ATCC Accession No. 201847).

[0245] Suitable promoters for S. cerevisiae include those associated with the PGKI gene, GAL1 or GAL10 genes, CYCI, PH05, TRP1, ADH1, ADH2, the genes for glyceraldehyde-3-phosphate dehydrogenase, hexokinase, pyruvate decarboxylase, phosphofructokinase, triose phosphate isomerase, phosphoglucose isomerase, glucokinase, alpha-mating factor pheromone, [a mating factor pheromone], the PRBI promoter, the GUT2 promoter, the GPDI promoter, and hybrid promoters involving hybrids of parts of 5′ regulatory regions with parts of 5′ regulatory regions of other promoters or with upstream activation sites (e.g. the promoter of EP-A-258 067).

[0246] Convenient regulatable promoters for use in Schizosaccharomyces pombe are the thiamine-repressible promoter from the nmt gene as described by Maundrell (1990) J. Biol. Chem. 265, 10857-10864 and the glucose repressible jbpl gene promoter as described by Hoffman & Winston (1990) Genetics 124, 807-816.

[0247] Methods of transforming Pichia for expression of foreign genes are taught in, for example, Gregg et al. (1993), and various Phillips patents (e.g. U.S. Pat. No. 4,857,467, incorporated herein by reference), and Pichia expression kits are commercially available from Invitrogen BV, Leek, Netherlands, and Invitrogen Corp., San Diego, Calif. Suitable promoters include AOX1 and AOX2. Gleeson et al. (1986) J. Gen. Microbiol. 132, 3459-3465 include information on Hansenula vectors and transformation, suitable promoters being MOX1 and FMD1; whilst EP 361 991, Fleer et al. (1991) and other publications from Rhone-Poulenc Rorer teach how to express foreign proteins in Kluyveromyces spp., a suitable promoter being PGKI.

[0248] The transcription termination signal is preferably the 3′ flanking sequence of a eukaryotic gene which contains proper signals for transcription termination and polyadenylation. Suitable 3′ flanking sequences may, for example, be those of the gene naturally linked to the expression control sequence used, i.e. may correspond to the promoter. Alternatively, they may be different in which case the termination signal of the S. cerevisiae ADHI gene is preferred.

[0249] In certain embodiments, the desired heteromultimer protein is initially expressed with a secretion leader sequence, which may be any leader effective in the yeast chosen. Leaders useful in S. cerevisiae include that from the mating factor alpha polypeptide (MFα-1) and the hybrid leaders of EP-A-387 319. Such leaders (or signals) are cleaved by the yeast before the mature albumin is released into the surrounding medium. Further such leaders include those of S. cerevisiae invertase (SUC2) disclosed in JP 62-096086 (granted as 911036516), acid phosphatase (PH05), the pre-sequence of MFα-1, 0 glucanase (BGL2) and killer toxin; S. diastaticus glucoarnylase II; S. carlsbergensis α-galactosidase (MEL1); K. lactis killer toxin; and Candida glucoarnylase.

[0250] Provided are vectors containing polynucleotides encoding a heteromultimer construct described herein, host cells, and the production of the heteromultimer proteins by synthetic and recombinant techniques. The vector may be, for example, a phage, plasmid, viral, or retroviral vector. Retroviral vectors may be replication competent or replication defective. In the latter case, viral propagation generally will occur only in complementing host cells.

[0251] In certain embodiments, the polynucleotides encoding heteromultimer proteins described herein are joined to a vector containing a selectable marker for propagation in a host. Generally, a plasmid vector is introduced in a precipitate, such as a calcium phosphate precipitate, or in a complex with a charged lipid. If the vector is a virus, it may be packaged in vitro using an appropriate packaging cell line and then transduced into host cells.

[0252] In certain embodiments, the polynucleotide insert is operatively linked to an appropriate promoter, such as the phage lambda PL promoter, the E. coli lac, trp, phoA and rac promoters, the SV40 early and late promoters and promoters of retroviral LTRs, to name a few. Other suitable promoters will be known to the skilled artisan. The expression constructs will further contain sites for transcription initiation, termination, and, in the transcribed region, a ribosome binding site for translation. The coding portion of the transcripts expressed by the constructs will preferably include a translation initiating codon at the beginning and a termination codon (UAA, UGA or UAG) appropriately positioned at the end of the polypeptide to be translated.

[0253] As indicated, the expression vectors will preferably include at least one selectable marker. Such markers include dihydrofolate reductase, G418, glutamine synthase, or neomycin resistance for eukaryotic cell culture, and tetracycline, kanamycin or ampicillin resistance genes for culturing in E. coli and other bacteria. Representative examples of appropriate hosts include, but are not limited to, bacterial cells, such as E. coli, Streptomyces and Salmonella typhimurium cells; fungal cells, such as yeast cells (e.g., Saccharomyces cerevisiae or Pichia pastoris (ATCC Accession No. 201178)); insect cells such as Drosophila S2 and Spodoptera Sf9 cells; animal cells such as CHO, COS, NSO, 293, and Bowes melanoma cells; and plant cells. Appropriate culture mediums and conditions for the above-described host cells are known in the art.

[0254] Among vectors preferred for use in bacteria include pQE70, pQE60 and pQE-9, available from QIAGEN, Inc.; pBluescript vectors, Phagescript vectors, pNH8A, pNH16a, pNH18A; pNH46A, available from Stratagene Cloning Systems, Inc.; and ptrc99a, pKK223-3, pKK233-3, pDR540, pRIT5 available from Pharmacia Biotech, Inc. Among preferred eukaryotic vectors are pWLNEO, pSV2CAT, pOG44, pXT1 and pSG available from Stratagene; and pSVK3, pBPV, pMSG and pSVL available from Pharmacia. Preferred expression vectors for use in yeast systems include, but are not limited to pYES2, pYD1, pTEF1/Zeo, pYES2/GS, pPICZ, pGAPZ, pGAPZalph, pPIC9, pPIC3.5, pHIL-D2, pHIL-S1, pPIC3.5K, pPIC9K, and PA0815 (all available from Invitrogen, Carlbad, Calif.). Other suitable vectors will be readily apparent to the skilled artisan.

[0255] In one embodiment, polynucleotides encoding a multispecific heteromultimer construct described herein are fused to signal sequences that will direct the localization of a protein of the invention to particular compartments of a prokaryotic or eukaryotic cell and/or direct the secretion of a protein of the invention from a prokaryotic or eukaryotic cell. For example, in E. coli, one may wish to direct the expression of the protein to the periplasmic space. Examples of signal sequences or proteins (or fragments thereof) to which the heteromultimeric proteins are fused in order to direct the expression of the polypeptide to the periplasmic space of bacteria include, but are not limited to, the pelB signal sequence, the maltose binding protein (MBP) signal sequence, MBP, the ompA signal sequence, the signal sequence of the periplasmic E. coli heat-labile enterotoxin B-subunit, and the signal sequence of alkaline phosphatase. Several vectors are commercially available for the construction of fusion proteins which will direct the localization of a protein, such as the pMAL series of vectors (particularly the pMAL-.rho. series) available from New England Biolabs. In a specific embodiment, polynucleotides albumin fusion proteins of the invention may be fused to the pelB pectate lyase signal sequence to increase the efficiency of expression and purification of such polypeptides in Gram-negative bacteria. See, U.S. Pat. Nos. 5,576,195 and 5,846,818, the contents of which are herein incorporated by reference in their entireties.

[0256] Examples of signal peptides that are fused to a heteromultimeric protein in order to direct its secretion in mammalian cells include, but are not limited to, the MPIF-1 signal sequence (e.g., amino acids 1-21 of GenBank Accession number AAB51134), the stanniocalcin signal sequence (MLQNSAVLLLLVISASA), and a consensus signal sequence (MPTWAWWLFLVLLLALWAPARG). A suitable signal sequence that may be used in conjunction with baculoviral expression systems is the gp67 signal sequence (e.g., amino acids 1-19 of GenBank Accession Number AAA72759).

[0257] Vectors which use glutamine synthase (GS) or DHFR as the selectable markers can be amplified in the presence of the drugs methionine sulphoximine or methotrexate, respectively. An advantage of glutamine synthase based vectors are the availabilty of cell lines (e.g., the murine myeloma cell line, NSO) which are glutamine synthase negative. Glutamine synthase expression systems can also function in glutamine synthase expressing cells (e.g., Chinese Hamster Ovary (CHO) cells) by providing additional inhibitor to prevent the functioning of the endogenous gene. A glutamine synthase expression system and components thereof are detailed in PCT publications: WO87/04462; WO86/05807; WO89/10036; WO89/10404; and WO91/06657, which are hereby incorporated in their entireties by reference herein. Additionally, glutamine synthase expression vectors can be obtained from Lonza Biologics, Inc. (Portsmouth, N.H.). Expression and production of monoclonal antibodies using a GS expression system in murine myeloma cells is described in Bebbington et al., Bio/technology 10:169(1992) and in Biblia and Robinson Biotechnol. Prog. 11:1(1995) which are herein incorporated by reference.

[0258] Also provided are host cells containing vector constructs described herein, and additionally host cells containing nucleotide sequences that are operably associated with one or more heterologous control regions (e.g., promoter and/or enhancer) using techniques known of in the art. The host cell can be a higher eukaryotic cell, such as a mammalian cell (e.g., a human derived cell), or a lower eukaryotic cell, such as a yeast cell, or the host cell can be a prokaryotic cell, such as a bacterial cell. A host strain may be chosen which modulates the expression of the inserted gene sequences, or modifies and processes the gene product in the specific fashion desired. Expression from certain promoters can be elevated in the presence of certain inducers; thus expression of the genetically engineered polypeptide may be controlled. Furthermore, different host cells have characteristics and specific mechanisms for the translational and post-translational processing and modification (e.g., phosphorylation, cleavage) of proteins. Appropriate cell lines can be chosen to ensure the desired modifications and processing of the foreign protein expressed.

[0259] Introduction of the nucleic acids and nucleic acid constructs of the invention into the host cell can be effected by calcium phosphate transfection, DEAE-dextran mediated transfection, cationic lipid-mediated transfection, electroporation, transduction, infection, or other methods. Such methods are described in many standard laboratory manuals, such as Davis et al., Basic Methods In Molecular Biology (1986). It is specifically contemplated that the polypeptides of the present invention may in fact be expressed by a host cell lacking a recombinant vector.

[0260] In addition to encompassing host cells containing the vector constructs discussed herein, the invention also encompasses primary, secondary, and immortalized host cells of vertebrate origin, particularly mammalian origin, that have been engineered to delete or replace endogenous genetic material (e.g., the coding sequence corresponding to a Cargo polypeptide is replaced with a heteromultimer protein corresponding to the Cargo polypeptide), and/or to include genetic material. The genetic material operably associated with the endogenous polynucleotide may activate, alter, and/or amplify endogenous polynucleotides.

[0261] In addition, techniques known in the art may be used to operably associate heterologous polynucleotides (e.g., polynucleotides encoding an albumin protein, or a fragment or variant thereof) and/or heterologous control regions (e.g., promoter and/or enhancer) with endogenous polynucleotide sequences encoding a Therapeutic protein via homologous recombination (see, e.g., U.S. Pat. No. 5,641,670, issued Jun. 24, 1997; International Publication Number WO 96/29411; International Publication Number WO 94/12650; Koller et al., Proc. Natl. Acad. Sci. USA 86:8932-8935 (1989); and Zijlstra et al., Nature 342:435-438 (1989), the disclosures of each of which are incorporated by reference in their entireties).

[0262] Heteromultimer proteins described herein can be recovered and purified from recombinant cell cultures by well-known methods including ammonium sulfate or ethanol precipitation, acid extraction, anion or cation exchange chromatography, phosphocellulose chromatography, hydrophobic interaction chromatography, affinity chromatography such as with protein A, hydroxylapatite chromatography, hydrophobic charge interaction chromatography and lectin chromatography. Most preferably, high performance liquid chromatography (“HPLC”) is employed for purification.

[0263] In certain embodiments the heteromultimer proteins of the invention are purified using Anion Exchange Chromatography including, but not limited to, chromatography on Q-sepharose, DEAE sepharose, poros HQ, poros DEAF, Toyopearl Q, Toyopearl QAE, Toyopearl DEAE, Resource/Source Q and DEAE, Fractogel Q and DEAE columns.

[0264] In specific embodiments the proteins described herein are purified using Cation Exchange Chromatography including, but not limited to, SP-sepharose, CM sepharose, poros HS, poros CM, Toyopearl SP, Toyopearl CM, Resource/Source S and CM, Fractogel S and CM columns and their equivalents and comparables.

[0265] In addition, heteromultimer proteins described herein can be chemically synthesized using techniques known in the art (e.g., see Creighton, 1983, Proteins: Structures and Molecular Principles, W. H. Freeman & Co., N.Y and Hunkapiller et al., Nature, 310:105-111 (1984)). For example, a polypeptide corresponding to a fragment of a polypeptide can be synthesized by use of a peptide synthesizer. Furthermore, if desired, nonclassical amino acids or chemical amino acid analogs can be introduced as a substitution or addition into the polypeptide sequence. Non-classical amino acids include, but are not limited to, to the D-isomers of the common amino acids, 2,4diaminobutyric acid, alpha-amino isobutyric acid, 4aminobutyric acid, Abu, 2-amino butyric acid, g-Abu, e-Ahx, 6amino hexanoic acid, Aib, 2-amino isobutyric acid, 3-amino propionic acid, ornithine, norleucine, norvaline, hydroxyproline, sarcosine, citrulline, homocitrulline, cysteic acid, t-butylglycine, t-butylalanine, phenylglycine, cyclohexylalanine, β-alanine, fluoro-amino acids, designer amino acids such as β-methyl amino acids, Cα-methyl amino acids, Nα-methyl amino acids, and amino acid analogs in general. Furthermore, the amino acid can be D (dextrorotary) or L (levorotary).

[0266] Assays:

[0267] The heteromultimer constructs described herein can be assayed for functional activity (e.g., biological activity) using or routinely modifying assays known in the art, as well as assays described herein.

[0268] For example, in one embodiment where one is assaying for the ability of a heteromultimer construct described herein to bind an antigen or to compete with another polypeptide for binding to an antigen, or bind to an Fc receptor and/or anti-albumin antibody, various immunoassays known in the art can be used, including but not limited to, competitive and non-competitive assay systems using techniques such as radioimmunoassays, ELISA (enzyme linked immunosorbent assay), “sandwich” immunoassays, immunoradiometric assays, gel diffusion precipitation reactions, immunodiffusion assays, in situ immunoassays (using colloidal gold, enzyme or radioisotope labels, for example), western blots, precipitation reactions, agglutination assays (e.g., gel agglutination assays, hemagglutination assays), complement fixation assays, immunofluorescence assays, protein A assays, and immunoelectrophoresis assays, etc. In one embodiment, antibody binding is detected by detecting a label on the primary antibody. In another embodiment, the primary antibody is detected by detecting binding of a secondary antibody or reagent to the primary antibody. In a further embodiment, the secondary antibody is labeled. Many means are known in the art for detecting binding in an immunoassay and are within the scope of the present invention.

[0269] In certain embodiments, where a binding partner (e.g., a receptor or a ligand) is identified for an antigen binding domain comprised by a heteromultimer described herein, binding to that binding partner by a heteromultimer described herein is assayed, e.g., by means well-known in the art, such as, for example, reducing and non-reducing gel chromatography, protein affinity chromatography, and affinity blotting. See generally, Phizicky et al., Microbiol. Rev. 59:94-123 (1995). In another embodiment, the ability of physiological correlates of a heteromultimeric protein to bind to a substrate(s) of antigen binding polypeptide constructs of the heteromultimers described herein can be routinely assayed using techniques known in the art.

[0270] Therapeutic Uses:

[0271] In an aspect, heteromultimers described herein are directed to antibody-based therapies which involve administering heteromultimers described comprising cargo polypeptide(s) which is an antibody, a fragment or variant of an antibody, to a patient for treating one or more of the disclosed diseases, disorders, or conditions. Therapeutic compounds described herein include, but are not limited to, heteromultimers described herein, nucleic acids encoding heteromultimers described herein.

[0272] In certain embodiments is provided a method for the prevention, treatment or amelioration of at least one of: a proliferative disease, a minimal residual cancer, a tumorous disease, an inflammatory disease, an immunological disorder, an autoimmune disease, an infectious disease, viral disease, allergic reactions, parasitic reactions, graft-versus-host diseases or host-versus-graft diseases or cell malignancies, said method comprising administering to a subject in need of such a prevention, treatment or amelioration a pharmaceutical composition comprising a heteromultimer construct described herein.

[0273] In certain embodiments is a method of treating cancer in a mammal in need thereof, comprising administering to the mammal a composition comprising an effective amount of the pharmaceutical composition described herein, optionally in combination with other pharmaceutically active molecules. In certain embodiments, the cancer is a solid tumor. In some embodiments, the solid tumor is one or more of sarcoma, carcinoma, and lymphoma. In certain other embodiments, the cancer is a hematological cancer. In some embodiments, the cancer is one or more of B-cell lymphoma, non-Hodgkin's lymphoma, and leukemia.

[0274] Provided is a method of treating cancer cells comprising providing to said cell a composition comprising a heteromultimer construct described herein. In some embodiments, the method further comprising providing said heteromultimer in conjugation with another therapeutic agent.

[0275] Provided is a method of treating a cancer non-responsive to blinatumomab in a mammal in need thereof, comprising administering to the mammal a composition comprising an effective amount of the pharmaceutical composition comprising a heteromultimer construct described herein.

[0276] In some embodiments is Aamethod of treating a cancer cell regressive after treatment with blinatumomab, comprising providing to said cancer cell a composition comprising an effective amount of the pharmaceutical composition comprising a heteromultimer construct described herein.

[0277] In some embodiments is a method of treating an individual suffering from a disease characterized by expression of B cells, said method comprising providing to said individual an effective amount of a composition comprising an effective amount of the pharmaceutical composition comprising a heteromultimer construct described herein. In some embodiments the disease is not responsive to treatment with at least one of an anti-CD19 antibody and an anti-CD20 antibody. In certain embodiments the disease is a cancer or autoimmune condition resistant to CD19 or CD20 lytic antibodies

[0278] Provided is a method of treating an autoimmune condition in a mammal in need thereof, comprising administering to said mammal a composition comprising an effective amount of the pharmaceutical composition described herein. In certain embodiments, the autoimmune condition is one or more of multiple sclerosis, rheumatoid arthritis, lupus erytematosus, psoriatic arthritis, psoriasis, vasculitis, uveitis, Crohn's disease, and type 1 diabetes.

[0279] Provided is a method of treating an inflammatory condition in a mammal in need thereof, comprising administering to said mammal a composition comprising an effective amount of the pharmaceutical composition comprising an heteromultimer described herein.

[0280] Armed with the teachings provided herein, one of ordinary skill in the art will know how to use the heteromultimers described herein for diagnostic, monitoring or therapeutic purposes without undue experimentation.

[0281] The heteromultimers described herein, comprising at least a fragment or variant of an antibody may be administered alone or in combination with other types of treatments (e.g., radiation therapy, chemotherapy, hormonal therapy, immunotherapy and anti-tumor agents). Generally, administration of products of a species origin or species reactivity (in the case of antibodies) that is the same species as that of the patient is preferred. Thus, in an embodiment, human antibodies, fragments derivatives, analogs, or nucleic acids, are administered to a human patient for therapy or prophylaxis.

[0282] Gene Therapy:

[0283] In a specific embodiment, nucleic acids comprising sequences encoding heteromultimer proteins described herein are administered to treat, inhibit or prevent a disease or disorder associated with aberrant expression and/or activity of a protein, by way of gene therapy. Gene therapy refers to therapy performed by the administration to a subject of an expressed or expressible nucleic acid. In this embodiment of the invention, the nucleic acids produce their encoded protein that mediates a therapeutic effect. Any of the methods for gene therapy available in the art can be used.

[0284] Though T cell-engaging bispecific single chain antibodies described in the art have great therapeutic potential for the treatment of malignant diseases, most of these bispecific molecules are limited in that they are species specific and recognize only human antigen, and—due to genetic similarity—likely the chimpanzee counterpart. The advantage of the present invention is the provision of a bispecific single chain antibody comprising a binding domain exhibiting cross-species specificity to human and non-chimpanzee primate of the CD3 epsilon chain.

[0285] Demonstration of Therapeutic or Prophylactic Activity:

[0286] The heteromultimers or pharmaceutical compositions described herein are tested in vitro, and then in vivo for the desired therapeutic or prophylactic activity, prior to use in humans. For example, in vitro assays to demonstrate the therapeutic or prophylactic utility of a compound or pharmaceutical composition include, the effect of a compound on a cell line or a patient tissue sample. The effect of the compound or composition on the cell line and/or tissue sample can be determined utilizing techniques known to those of skill in the art including, but not limited to, rosette formation assays and cell lysis assays. In accordance with the invention, in vitro assays which can be used to determine whether administration of a specific compound is indicated, include in vitro cell culture assays in which a patient tissue sample is grown in culture, and exposed to or otherwise administered a heteromultimer, and the effect of such heteromultimer upon the tissue sample is observed.

[0287] Therapeutic/Prophylactic Administration and Composition:

[0288] Provided are methods of treatment, inhibition and prophylaxis by administration to a subject of an effective amount of a heteromultimer or pharmaceutical composition described herein. In an embodiment, the heteromultimer is substantially purified (e.g., substantially free from substances that limit its effect or produce undesired side-effects). In certain embodiments, the subject is an animal, including but not limited to animals such as cows, pigs, horses, chickens, cats, dogs, etc., and in certain embodiments, a mammal, and most preferably human.

[0289] Various delivery systems are known and can be used to administer a heteromultimer formulation described herein, e.g., encapsulation in liposomes, microparticles, microcapsules, recombinant cells capable of expressing the compound, receptor-mediated endocytosis (see, e.g., Wu and Wu, J. Biol. Chem. 262:4429-4432 (1987)), construction of a nucleic acid as part of a retroviral or other vector, etc. Methods of introduction include but are not limited to intradermal, intramuscular, intraperitoneal, intravenous, subcutaneous, intranasal, epidural, and oral routes. The compounds or compositions may be administered by any convenient route, for example by infusion or bolus injection, by absorption through epithelial or mucocutaneous linings (e.g., oral mucosa, rectal and intestinal mucosa, etc.) and may be administered together with other biologically active agents. Administration can be systemic or local. In addition, in certain embodiments, it is desirable to introduce the heteromultimer compositions described herein into the central nervous system by any suitable route, including intraventricular and intrathecal injection; intraventricular injection may be facilitated by an intraventricular catheter, for example, attached to a reservoir, such as an Ommaya reservoir. Pulmonary administration can also be employed, e.g., by use of an inhaler or nebulizer, and formulation with an aerosolizing agent.

[0290] In a specific embodiment, it is desirable to administer the heteromultimers, or compositions described herein locally to the area in need of treatment; this may be achieved by, for example, and not by way of limitation, local infusion during surgery, topical application, e.g., in conjunction with a wound dressing after surgery, by injection, by means of a catheter, by means of a suppository, or by means of an implant, said implant being of a porous, non-porous, or gelatinous material, including membranes, such as sialastic membranes, or fibers. Preferably, when administering a protein, including an antibody, of the invention, care must be taken to use materials to which the protein does not absorb.

[0291] In another embodiment, the heteromultimers or composition can be delivered in a vesicle, in particular a liposome (see Langer, Science 249:1527-1533 (1990); Treat et al., in Liposomes in the Therapy of Infectious Disease and Cancer, Lopez-Berestein and Fidler (eds.), Liss, New York, pp. 353-365 (1989); Lopez-Berestein, ibid., pp. 317-327; see generally ibid.)

[0292] In yet another embodiment, the heteromultimers or composition can be delivered in a controlled release system. In one embodiment, a pump may be used (see Langer, supra; Sefton, CRC Crit. Ref. Biomed. Eng. 14:201 (1987); Buchwald et al., Surgery 88:507 (1980); Saudek et al., N. Engl. J. Med. 321:574 (1989)). In another embodiment, polymeric materials can be used (see Medical Applications of Controlled Release, Langer and Wise (eds.), CRC Pres., Boca Raton, Fla. (1974); Controlled Drug Bioavailability, Drug Product Design and Performance, Smolen and Ball (eds.), Wiley, New York (1984); Ranger and Peppas, J., Macromol. Sci. Rev. Macromol. Chem. 23:61 (1983); see also Levy et al., Science 228:190 (1985); During et al., Ann. Neurol. 25:351 (1989); Howard et al., J. Neurosurg. 71:105 (1989)). In yet another embodiment, a controlled release system can be placed in proximity of the therapeutic target, e.g., the brain, thus requiring only a fraction of the systemic dose (see, e.g., Goodson, in Medical Applications of Controlled Release, supra, vol. 2, pp. 115-138 (1984)).

[0293] Other controlled release systems are discussed in the review by Langer (Science 249:1527-1533 (1990)).

[0294] In a specific embodiment comprising a nucleic acid encoding a heteromultimer described herein, the nucleic acid can be administered in vivo to promote expression of its encoded protein, by constructing it as part of an appropriate nucleic acid expression vector and administering it so that it becomes intracellular, e.g., by use of a retroviral vector (see U.S. Pat. No. 4,980,286), or by direct injection, or by use of microparticle bombardment (e.g., a gene gun; Biolistic, Dupont), or coating with lipids or cell-surface receptors or transfecting agents, or by administering it in linkage to a homeobox-like peptide which is known to enter the nucleus (see e.g., Joliot et al., Proc. Natl. Acad. Sci. USA 88:1864-1868 (1991)), etc. Alternatively, a nucleic acid can be introduced intracellularly and incorporated within host cell DNA for expression, by homologous recombination.

[0295] Also provided herein are pharmaceutical compositions. Such compositions comprise a therapeutically effective amount of a compound, and a pharmaceutically acceptable carrier. In a specific embodiment, the term “pharmaceutically acceptable” means approved by a regulatory agency of the Federal or a state government or listed in the U.S. Pharmacopeia or other generally recognized pharmacopeia for use in animals, and more particularly in humans. The term “carrier” refers to a diluent, adjuvant, excipient, or vehicle with which the therapeutic is administered. Such pharmaceutical carriers can be sterile liquids, such as water and oils, including those of petroleum, animal, vegetable or synthetic origin, such as peanut oil, soybean oil, mineral oil, sesame oil and the like. Water is a preferred carrier when the pharmaceutical composition is administered intravenously. Saline solutions and aqueous dextrose and glycerol solutions can also be employed as liquid carriers, particularly for injectable solutions. Suitable pharmaceutical excipients include starch, glucose, lactose, sucrose, gelatin, malt, rice, flour, chalk, silica gel, sodium stearate, glycerol monostearate, talc, sodium chloride, dried skim milk, glycerol, propylene, glycol, water, ethanol and the like. The composition, if desired, can also contain minor amounts of wetting or emulsifying agents, or pH buffering agents. These compositions can take the form of solutions, suspensions, emulsion, tablets, pills, capsules, powders, sustained-release formulations and the like. The composition can be formulated as a suppository, with traditional binders and carriers such as triglycerides. Oral formulation can include standard carriers such as pharmaceutical grades of mannitol, lactose, starch, magnesium stearate, sodium saccharine, cellulose, magnesium carbonate, etc. Examples of suitable pharmaceutical carriers are described in “Remington's Pharmaceutical Sciences” by E. W. Martin. Such compositions will contain a therapeutically effective amount of the compound, preferably in purified form, together with a suitable amount of carrier so as to provide the form for proper administration to the patient. The formulation should suit the mode of administration.

[0296] In certain embodiments, the composition comprising the heteromultimer is formulated in accordance with routine procedures as a pharmaceutical composition adapted for intravenous administration to human beings. Typically, compositions for intravenous administration are solutions in sterile isotonic aqueous buffer. Where necessary, the composition may also include a solubilizing agent and a local anesthetic such as lignocaine to ease pain at the site of the injection. Generally, the ingredients are supplied either separately or mixed together in unit dosage form, for example, as a dry lyophilized powder or water free concentrate in a hermetically sealed container such as an ampoule or sachette indicating the quantity of active agent. Where the composition is to be administered by infusion, it can be dispensed with an infusion bottle containing sterile pharmaceutical grade water or saline. Where the composition is administered by injection, an ampoule of sterile water for injection or saline can be provided so that the ingredients may be mixed prior to administration.

[0297] In certain embodiments, the compositions described herein are formulated as neutral or salt forms. Pharmaceutically acceptable salts include those formed with anions such as those derived from hydrochloric, phosphoric, acetic, oxalic, tartaric acids, etc., and those formed with cations such as those derived from sodium, potassium, ammonium, calcium, ferric hydroxide isopropylamine, triethylamine, 2-ethylamino ethanol, histidine, procaine, etc.

[0298] The amount of the composition described herein which will be effective in the treatment, inhibition and prevention of a disease or disorder associated with aberrant expression and/or activity of a Therapeutic protein can be determined by standard clinical techniques. In addition, in vitro assays may optionally be employed to help identify optimal dosage ranges. The precise dose to be employed in the formulation will also depend on the route of administration, and the seriousness of the disease or disorder, and should be decided according to the judgment of the practitioner and each patient's circumstances. Effective doses are extrapolated from dose-response curves derived from in vitro or animal model test systems.

[0299] In certain embodiments, a heteromultimer construct described herein is suitably administered to the patient at one time or over a series of treatments. Depending on the type and severity of the disease, about 1 μg/kg to 15 mg/kg (e.g. 0.1 mg/kg-10 mg/kg) of T cell activating bispecific antigen binding molecule can be an initial candidate dosage for administration to the patient, whether, for example, by one or more separate administrations, or by continuous infusion. One typical daily dosage might range from about 1 μg/kg to 100 mg/kg or more, depending on the factors mentioned above. For repeated administrations over several days or longer, depending on the condition, the treatment would generally be sustained until a desired suppression of disease symptoms occurs. One exemplary dosage of the heteromultimer described herein would be in the range from about 0.005 mg/kg to about 10 mg/kg. In other non-limiting examples, a dose may also comprise from about 1 microgram/kg body weight, about 5 microgram/kg body weight, about 10 microgram/kg body weight, about 50 microgram/kg body weight, about 100 microgram/kg body weight, about 200 microgram/kg body weight, about 350 microgram/kg body weight, about 500 microgram/kg body weight, about 1 milligram/kg body weight, about 5 milligram/kg body weight, about 10 milligram/kg body weight, about 50 milligram/kg body weight, about 100 milligram/kg body weight, about 200 milligram/kg body weight, about 350 milligram/kg body weight, about 500 milligram/kg body weight, to about 1000 mg/kg body weight or more per administration, and any range derivable therein. In non-limiting examples of a derivable range from the numbers listed herein, a range of about 5 mg/kg body weight to about 100 mg/kg body weight, about 5 microgram kg body weight to about 500 milligram kg body weight, etc., can be administered, based on the numbers described above. Thus, one or more doses of about 0.5 mg/kg, 2.0 mg/kg, 5.0 mg/kg or 10 mg/kg (or any combination thereof) may be administered to the patient. Such doses may be administered intermittently, e.g. every week or every three weeks (e.g. such that the patient receives from about two to about twenty, or e.g. about six doses of the T cell activating bispecific antigen binding molecule). An initial higher loading dose, followed by one or more lower doses may be administered. However, other dosage regimens may be useful. The progress of this therapy is easily monitored by conventional techniques and assays.

[0300] The heteromultimers described herein are generally used in an amount effective to achieve the intended purpose. For use to treat or prevent a disease condition, a heteromultimer described herein, or pharmaceutical compositions thereof, are administered or applied in a therapeutically effective amount. Determination of a therapeutically effective amount is well within the capabilities of those skilled in the art, especially in light of the detailed disclosure provided herein.

[0301] For systemic administration, a therapeutically effective dose can be estimated initially from in vitro assays, such as cell culture assays. A dose can then be formulated in animal models to achieve a circulating concentration range that includes the IC₅₀ as determined in cell culture. Such information can be used to more accurately determine useful doses in humans.

[0302] Initial dosages can also be estimated from in vivo data, e.g., animal models, using techniques that are well known in the art. One having ordinary skill in the art could readily optimize administration to humans based on animal data.

[0303] Dosage amount and interval may be adjusted individually to provide plasma levels of the heteromultimer described herein which are sufficient to maintain therapeutic effect. Usual patient dosages for administration by injection range from about 0.1 to 50 mg/kg/day, typically from about 0.5 to 1 mg/kg/day. Therapeutically effective plasma levels may be achieved by administering multiple doses each day. Levels in plasma may be measured, for example, by HPLC.

[0304] In cases of local administration or selective uptake, the effective local concentration of the heteromultimer described herein may not be related to plasma concentration. One having skill in the art will be able to optimize therapeutically effective local dosages without undue experimentation.

[0305] A therapeutically effective dose of the heteromultimer constructs described herein will generally provide therapeutic benefit without causing substantial toxicity. Toxicity and therapeutic efficacy of a heteromultimer described herein can be determined by standard pharmaceutical procedures in cell culture or experimental animals. Cell culture assays and animal studies can be used to determine the LD₅₀ (the dose lethal to 50% of a population) and the ED₅₀ (the dose therapeutically effective in 50% of a population). The dose ratio between toxic and therapeutic effects is the therapeutic index, which can be expressed as the ratio LD₅₀/ED₅₀. T cell activating bispecific antigen binding molecules that exhibit large therapeutic indices are preferred. In one embodiment, the heteromultimer construct described herein according to the present invention exhibits a high therapeutic index. The data obtained from cell culture assays and animal studies can be used in formulating a range of dosages suitable for use in humans. The dosage lies preferably within a range of circulating concentrations that include the ED50 with little or no toxicity. The dosage may vary within this range depending upon a variety of factors, e.g., the dosage form employed, the route of administration utilized, the condition of the subject, and the like. The exact formulation, route of administration and dosage can be chosen by the individual physician in view of the patient's condition (see, e.g., Fingl et al, 1975, in: The Pharmacological Basis of Therapeutics, Ch. 1, p. 1, incorporated herein by reference in its entirety).

[0306] The attending physician for patients treated with heteromultimer constructs described herein would know how and when to terminate, interrupt, or adjust administration due to toxicity, organ dysfunction, and the like. Conversely, the attending physician would also know to adjust treatment to higher levels if the clinical response were not adequate (precluding toxicity). The magnitude of an administered dose in the management of the disorder of interest will vary with the severity of the condition to be treated, with the route of administration, and the like. The severity of the condition may, for example, be evaluated, in part, by standard prognostic evaluation methods. Further, the dose and perhaps dose frequency will also vary according to the age, body weight, and response of the individual patient.

[0307] Also provided is a process for the production of a pharmaceutical composition comprising a eteromutlimer described herein, said process comprising: culturing a host cell under conditions allowing the expression of a heteromultimer; recovering the produced heteromultimer from the culture; and producing the pharmaceutical composition.

[0308] Other Agents and Treatments:

[0309] In certain embodiments, the heteromultimer constructs described herein are administered in combination with one or more other agents in therapy. For instance, in one embodiment, a heteromultimer described herein is co-administered with at least one additional therapeutic agent. The term “therapeutic agent” encompasses any agent administered to treat a symptom or disease in an individual in need of such treatment. Such additional therapeutic agent may comprise any active ingredients suitable for the particular indication being treated, preferably those with complementary activities that do not adversely affect each other. In certain embodiments, an additional therapeutic agent is an immunomodulatory agent, a cytostatic agent, an inhibitor of cell adhesion, a cytotoxic agent, an activator of cell apoptosis, or an agent that increases the sensitivity of cells to apoptotic inducers. In a particular embodiment, the additional therapeutic agent is an anti-cancer agent, for example a microtubule disruptor, an antimetabolite, a topoisomerase inhibitor, a DNA intercalator, an alkylating agent, a hormonal therapy, a kinase inhibitor, a receptor antagonist, an activator of tumor cell apoptosis, or an antiangio genie agent.

[0310] Such other agents are suitably present in combination in amounts that are effective for the purpose intended. The effective amount of such other agents depends on the amount of T cell activating bispecific antigen binding molecule used, the type of disorder or treatment, and other factors discussed above. The heteromultimers described herein are generally used in the same dosages and with administration routes as described herein, or about from 1 to 99% of the dosages described herein, or in any dosage and by any route that is empirically/clinically determined to be appropriate.

[0311] Such combination therapies noted above encompass combined administration (where two or more therapeutic agents are included in the same or separate compositions), and separate administration, in which case, administration of the heteromultimer described herein can occur prior to, simultaneously, and/or following, administration of the additional therapeutic agent and/or adjuvant. Heteromultimer constructs described herein can also be used in combination with radiation therapy.

[0312] Articles of Manufacture:

[0313] In another aspect of the invention, an article of manufacture containing materials useful for the treatment, prevention and/or diagnosis of the disorders described above is provided. The article of manufacture comprises a container and a label or package insert on or associated with the container. Suitable containers include, for example, bottles, vials, syringes, IV solution bags, etc. The containers may be formed from a variety of materials such as glass or plastic. The container holds a composition which is by itself or combined with another composition effective for treating, preventing and/or diagnosing the condition and may have a sterile access port (for example the container may be an intravenous solution bag or a vial having a stopper pierceable by a hypodermic injection needle). At least one active agent in the composition is a T cell activating bispecific antigen binding molecule of the invention. The label or package insert indicates that the composition is used for treating the condition of choice. Moreover, the article of manufacture may comprise (a) a first container with a composition contained therein, wherein the composition comprises a heteromultimer described herein; and (b) a second container with a composition contained therein, wherein the composition comprises a further cytotoxic or otherwise therapeutic agent. The article of manufacture in this embodiment of the invention may further comprise a package insert indicating that the compositions can be used to treat a particular condition. Alternatively, or additionally, the article of manufacture may further comprise a second (or third) container comprising a pharmaceutically-acceptable buffer, such as bacteriostatic water for injection (BWFI), phosphate-buffered saline, Ringer's solution and dextrose solution. It may further include other materials desirable from a commercial and user standpoint, including other buffers, diluents, filters, needles, and syringes.

### EXAMPLES

[0314] The following specific and non-limiting examples are to be construed as merely illustrative, and do not limit the present disclosure in any way whatsoever. Without further elaboration, it is believed that one skilled in the art can, based on the description herein, utilize the present disclosure to its fullest extent. All publications cited herein are hereby incorporated by reference in their entirety. Where reference is made to a URL or other such identifier or address, it is understood that such identifiers can change and particular information on the internet can come and go, but equivalent information can be found by searching the internet. Reference thereto evidences the availability and public dissemination of such information.

### Example 1

### Bispecific CD3-CD19 scFvs Fused to an Asymmetric IgG1 Fc

[0315] Bispecific CD3-CD19 scFvs fused to an asymmetric IgG1 Fc heterodimer that exhibits stability comparable with native Fc homodimer, is a novel composition identified as v873. V873 belongs to a novel family of CD3-based bispecific azymetric IgG1 antibodies that can be expressed and purified with significantly higher yields in mammalian CHO cells compared to Amgen/Micromet bscCD19×CD3 BiTE bispecific. V873 demonstrates unexpected effector:target cell binding, bridging and target cell killing.

[0316] V873 and bispecific CD3-based azymetric antibodies have utility in targeted T cell mediated killing of diseased cells and hence may be useful for treating cancers and autoimmune and inflammatory diseases. V873 is a bispecific CD3-CD19 scFvs fused to an azymetric IgG1 Fc. v873 represents a novel bispecific azymetric antibody class comprising one anti-CD3 warhead and a second warhead comprising a cell surface antigen of a target cell, and an antibody Fc heterodimer comprising heterodimer IgG1 Fc. The fusion of the CD3 warhead to chain A or B of the Fc is important for its druggable properties. As additional examples, V874 and V875 are two other Bispecific CD3-CD19 scFvs fused to an asymmetric IgG1 Fc but have different CD3 amino acid compositions.

[0317] V873 shows unexpected good mammalian CHO expression and purification yields compared to the Amgen/Micromet blinatumomab CD3-CD19 BiTE tandem scFvs. V873 bridges T and B cells and results in potent killing of cultured human Burkitt lymphoma cells (Raji B-cell lymphoma line) using resting and IL-2 activated human PBMCs.

[0318] V873 and its related bispecific CD3-Azymetric antibodies differ from Amgen/Micromet CD3-CD19 BiTE and possess an IgG1 heterodimeric Fc that can bind FcgRs to mediate ADCC, CDC, ADCP effector activities. V873 can bind FcRn and this heterodimeric Fc class shows typical antibody manufacturability characteristics and long-half life of greater than 8 days in cynomolgus monkey. In contrast, blinatumomab has a half-life of less than several hours in non-human monkey and in human patients.

[0319] V873 and related bispecific CD3-based constructs address known stability issues with tandem scFvs and generally recognized poor manufacturability of blinatumomab. V873 addresses the short PK of blinatumomab and CNS adverse effects owing to its wildtype FcRn binding affinity and MWT which restricts its distribution to the peripheral compartment. Lastly, the Azymetric heterodimer Fc confers additional tailored FcgR effector ADCC, CDC, and ADCP activities and hence efficacy to drug resistant tumors.

[0320] The ability of v873 to mediate PBMC (T cell)-B cell killing is highly unexpected. The properties of blinatumomab bscCD19×CD3 and related BiTEs is reported to rely on the use of flexibly linked single-chain variable fragments (scFv) that are arranged in tandem joined by a short linker will allow for a much closer approximation of opposing cells than is possible with larger bispecific formats such as quadroma antibodies. The flexible linkage is expected to enable free rotation and kinking of the 2 scFv arms, thereby facilitating the simultaneous recognition of 2 epitopes present on 2 opposing cell membranes and the formation of a cytolytic immunologic synapse. Hence, based on what has been reported and generally accepted as unique to BiTE, it is unexpected that a bispecific CD3-CD19 construct as described herein with significantly different structural presentations of CD3 and CD19 scFv warheads on the heterodimer Fc can bind, bridge T and B cells, and mediate PBMC (T cell)-B cell killing. Other applications include depletion of B cells in B cell driven autoimmune and inflammatory diseases such as RA, lupus, MS, IBD. Further, V873 related bispecific CD3-Based azymetric antibodies may be useful for diagnostic purposes.

[0321] Additional details regarding the above are found in the following examples.

### Example 2

[0322] Design, expression and purification of heteromultimer constructs with a heterodimeric Fc.

[0323] Exemplary bispecific anti-CD3 and anti-CD19 heterodimeric antibodies

[0324] An exemplary schematic representation of an anti-CD3/anti-CD19 antibody is shown in FIG. 1A.

[0325] v873, v874, v875 exemplify bispecific anti-CD3/anti-CD19 heterodimeric Fc constructs and were prepared and tested as described below. Where the description includes a reference to BiTE, it refers to the antibody construct having an identical amino acid sequence to either the VH or VL of the anti-CD3 anti-CD19 BiTE molecule with or without modifications to variable heavy and light chain orientation (e.g. VH-VL) as indicated below.

[0326] v873 has a anti-CD19 BiTE (VL-VH) scFv on chain A and a CD3 BiTE™ (VH-VL) scFv on chain B of the heterodimer Fc with the following mutations L351Y_F405A_Y407V on chain A and T366L_K392M_T394W on chain B. [Polypeptide sequences correspond to SEQ ID No: 26 and 28]

[0327] V874 has a anti-CD19 BiTE™ (VL-VH) scFv on chain A and the CD3 BiTE™ (VLVH) scFv on chain B of the heterodimer Fc with the following mutations L351Y_F405A_Y407V on chain A and T366L_K392M_T394W on chain B. [Polypeptide sequences correspond to SEQ ID No: 30 and 32]

[0328] V875 has a anti-CD19 BiTE™ (VL-VH) scFv on chain A and the CD3 OKT3 (VL-VH) scFv on chain B of the heterodimer Fc with the following mutations L351Y_F405A_Y407V on chain A and T366L_K392M_T394W on chain B. [Polypeptide sequences correspond to SEQ ID No: 34 and 36]

[0329] v1379 has a anti-CD19 BiTE™ (VL-VH) scFv on chain A and a anti-CD3 (VH-VL) BiTE on chain B of the heterodimer Fc with the following mutations T350V_L351Y_F405A_Y407V on chain A and T350V_T366L_K392L_T394W on chain B. [Polypeptide sequences correspond to SEQ ID No: 87 and 88]

[0330] Bivalent monospecific anti-CD3 and anti-CD19 antibodies

[0331] v865, v866, v867, v868 exemplify monospecific anti-CD3 or CD19 bivalent scFv-Fc constructs and were prepared and tested as described below:

[0332] v865 has a anti-CD19 BiTE (VL-VH) scFv on chain A and a anti-CD19 BiTE scFv chain B with WT Fc (105 kDa). [Polypeptide sequence correspond to SEQ ID No: 2]

[0333] v866 has a anti-CD3 BiTE™ (VH-VL) on chain A and a anti-CD3 BiTE™ (VH-VL) scFv on chain with a WT Fc (105 kDa). [Polypeptide sequence correspond to SEQ ID No: 4]

[0334] v867 has a anti-CD3 BiTE™ (VL-VH) scFv on chain A and a anti-CD3 BiTE™ (VL-VH) scFv on chain B with a WT Fc (105 kDa). [Polypeptide sequence correspond to SEQ ID No: 6]

[0335] v868 has a anti-CD3 OKT3 (VL-VH) scFv on chain A and a anti-CD3 OKT3 VL-VH scFv on chain with a WT Fc (105 kDa). [Polypeptide sequence correspond to SEQ ID No: 8].

[0336] Monovalent monospecific anti-CD3

[0337] v869 has a anti-CD19 BiTE™ scFv (VL-VH) on chain A and a Fc on chain B of the heterodimer Fc with the following mutations L351Y_F405A_Y407V on chain A and T366L_K392M_T394W on chain B (80 kDa). [Polypeptide sequences correspond to SEQ ID No: 10 and 12].

[0338] v870 has a anti-CD3 BiTE™ (VH-VL) scFv on chain B and a Fc on chain A of the heterodimer Fc with the following mutations L351Y_F405A_Y407V on chain A and T366L_K392M_T394W on chain B (80 kDa). [Polypeptide sequences correspond to SEQ ID No: 14 and 16].

[0339] v871 has a anti-CD3 BiTE™ (VL-VH) scFv on chain B and a Fc on chain A of the heterodimer Fc with the following mutations L351Y_F405A_Y407V on chain A and T366L_K392M_T394W on chain B (80 kDa). [Polypeptide sequences correspond to SEQ ID No: 18 and 20].

[0340] v872 has a anti-CD3 OKT3 (VL-VH) scFv on chain B and a Fc on chain A of the heterodimer Fc with the following mutations L351Y_F405A_Y407V on chain A and T366L_K392M_T394W on chain B (80 kDa). [Polypeptide sequences correspond to SEQ ID No: 22 and 24].

[0341] Benchmark Control

[0342] v891 has the identical sequence blinatumomab BiTE™ anti-CD3 BiTE scFv and anti-CD19 BiTE scFv (50 kDa) [Polypeptide sequence corresponds to SEQ ID No: 90

[0343] Exemplary mono- or bispecific anti-CD3 and anti-CD19 heterodimeric antibodies with a knock-out Fc

[0344] v1380 has a anti-CD19 BiTE™ (VL-VH) scFv on chain A and a anti-CD3 VHVL BiTE™ on chain B of the heterodimer Fc with the following mutations L234A_L235A_T350V_L351Y_F405A_Y407V on chain A and L234A_L235A_T350V_T366L_K392L_T394W on chain B (corresponding to polypeptide sequences SEQ ID NOs:93 and 94).

[0345] v1381 has a anti-CD19 BiTE™ (VI-VH) scFv on chain A and a anti-CD3 BiTE™ scFv (VH-VL) on chain B of the heterodimer Fc with the following mutations N297A_T350V_L351Y_F405A_Y407V on chain A and N297A_T350V_T366L_K392L_T394W on chain B. (corresponding to polypeptide sequences SEQ ID NOs: 93 and 98)

[0346] Variants with engineered anti-CD3 warheads for stability enhancement

[0347] The following variants contain mutations to the anti-CD3 scFv that include either changes to the linker length, VH-VL orientations, or point mutations to improve stability and yeild.

[0348] v1653 has a anti-CD19 BiTE™ (VL-VH) scFv on chain A and a anti-CD3 OKT3 (VL-VH) (with C to S mutation at position 100A of the VH CDR3) on chain B of the heterodimer Fc with the following mutations T350V_L351Y_F405A_Y407V on chain A and T350V_T366L_K392L_T394W on chain B. (corresponding to polypeptide sequences SEQ ID NOs: 101 and 102)

[0349] v1654 has a anti-CD19 BiTE™ scFv on chain A and a anti-CD3 OKT3 OKT3 (VH-VL) with 18 amino acid linker chain B of the heterodimer Fc with the following mutations T350V_L351Y_F405A_Y407V on chain A and T350V_T366L_K392L_T394W on chain B. (corresponding to polypeptide sequences SEQ ID NOs: 105 and 106)

[0350] v1655 has a anti-CD19 BiTE™ scFv on chain A and a anti-CD3 OKT3 OKT3 (VH-VL) with 10 amino acid linker chain B of the heterodimer Fc with the following mutations T350V_L351Y_F405A_Y407V on chain A and T350V_T366L_K392L_T394W on chain B. (corresponding to polypeptide sequences SEQ ID NOs: 109 and 110)

[0351] v1656 has a anti-CD3 BiTE™ VHVL scFv on chain A and a anti-CD19 BiTE™ (VL-VH) on chain B of the heterodimer Fc with the following mutations T350V_L351Y_F405A_Y407V on chain A and T350V_T366L_K392L_T394W on chain B. (corresponding to polypeptide sequences SEQ ID NOs: 113 and 114)

[0352] v1657 has a anti-CD3 OKT3 (VL-VH) scFv (with C to S mutation at position 100A of the VH CDR3) on chain A and a anti-CD19 BiTE™ (VL-VH) scFv on chain B of the heterodimer Fc with the following mutations T350V_L351Y_F405A_Y407V on chain A and T350V_T366L_K392L_T394W on chain B. (corresponding to polypeptide sequences SEQ ID NOs: 117 and 118)

[0353] v1658 has a anti-CD3 OKT3 (VH-VL) scFv with 18 amino acid linker on chain A and a anti-CD19 BiTE™ (VL-VH) scFv on chain B of the heterodimer Fc with the following mutations T350V_L351Y_F405A_Y407V on chain A and T350V_T366L_K392L_T394W on chain B. (corresponding to polypeptide sequences SEQ ID NOs: 121 and 122)

[0354] v1659 has a anti-CD3 OKT3 (VH-VL) scFv with 10 amino acid linker on chain A and a anti-CD19 BiTE™ (VL_VH) scFv on chain B of the heterodimer Fc with the following mutations T350V_L351Y_F405A_Y407V on chain A and T350V_T366L_K392L_T394W on chain B. (corresponding to polypeptide sequences SEQ ID NOs: 125 and 126)

[0355] v1660 has a anti-CD3 OKT3 (VH-VL) scFv with 19 amino acid linker on chain A and a anti-CD19 BiTE™ (VL-VH) scFv on chain B of the heterodimer Fc with the following mutations T350V_L351Y_F405A_Y407V on chain A and T350V_T366L_K392L_T394W on chain B. (corresponding to polypeptide sequences SEQ ID NOs: 129 and 130)

[0356] Fc knock-out variants with engineered anti-CD3 warheads for stability enhancement

[0357] The following variants are Fc knoock outs that contain mutations to the anti-CD3 scFv that include either changes to the linker length, VH-VL orientations, or point mutations to improve stability and yeild.

[0358] v1661 has a anti-CD19 BiTE™ (VL-VH) scFv on chain A and a anti-CD3 OKT3 (VL-VH) scFv on chain B of the heterodimer Fc with the following mutations D265S_L234A_L235A_T350V_L351Y_F405A_Y407V on chain A and D265S_L234A_L235A_T350V_T366L_K392L_T394W on chain B. [Polypeptide sequences correspond to SEQ ID No: 38 and 40]

[0359] v1662 has a anti-CD19 BiTE™ (VL-VH) scFv on chain A and a anti-CD3 OKT3 (VL-VH) scFv (with C to S mutation at position 100A of the VH CDR3) on chain B of the heterodimer Fc with the following mutations D265S_L234A_L235A_T350V_L351Y_F405A_Y407V on chain A and D265S_L234A_L235A_T350V_T366L_K392L_T394W on chain B. [Polypeptide sequences correspond to SEQ ID No: 42 and 44]

[0360] v1663 has a anti-CD19 BiTE™ (VL-VH) scFv on chain A and a anti-CD3 OKT3 (VL-VH) scFv with 18 amino acid linker on chain B of the heterodimer Fc with the following mutations D265S_L234A_L235A_T350V_L351Y_F405A_Y407V on chain A and D265S_L234A_L235A_T350V_T366L_K392L_T394W on chain B. (corresponding to polypeptide sequences SEQ ID NOs: 133 and 134)

[0361] v1664 has a anti-CD19 BiTE™ (VL-VH) scFv on chain A and a anti-CD3 OKT3 (VH-VL) scFv with 10 amino acid linker on chain B of the heterodimer Fc with the following mutations D265S_L234A_L235A_T350V_L351Y_F405A_Y407V on chain A and D265S_L234A_L235A_T350V_T366L_K392L_T394W on chain B. (corresponding to polypeptide sequences SEQ ID NOs: 137 and 138)

[0362] v1665 has a anti-CD3 BiTE™ (VH-VL) scFv on chain A and a anti-CD19 BiTE™ (VL-VH) scFv on chain B of the heterodimer Fc with the following mutations D265S_L234A_L235A_T350V_L351Y_F405A_Y407V on chain A and D265S_L234A_L235A_T350V_T366L_K392L_T394W on chain B. (corresponding to polypeptide sequences SEQ ID NOs: 141 and 142)

[0363] v1666 has a anti-CD3 OKT3 (VH-VL) scFv with a 19 amino acid linker on chain A and a anti-CD19 BiTE™ (VL-VH) scFv on chain B of the heterodimer Fc with the following mutations D265S_L234A_L235A_T350V_L351Y_F405A_Y407V on chain A and D265S_L234A_L235A_T350V_T366L_K392L_T394W on chain B [Polypeptide sequences correspond to SEQ ID No: 46 and 48].

[0364] v1667 has a anti-CD19 BiTE™ (VL-VH) scFv on chain A and a anti-CD3 OKT3 (VL-VH) scFv on chain B of the heterodimer Fc with the following mutations N297A_T350V_L351Y_F405A_Y407V on chain A and N297A_T350V_T366L_K392L_T394W on chain B. (corresponding to polypeptide sequences SEQ ID NOs: 145 and 146)

[0365] v1668 has a anti-CD19 BiTE™ (VL-VH) scFv on chain A and a anti-CD3 OKT3 (VL-VH) scFv (with C to S mutation at position 100A of the VH CDR3) on chain B of the heterodimer Fc with the following mutations N297A_T350V_L351Y_F405A_Y407V on chain A and N297A_T350V_T366L_K392L_T394W on chain B. (corresponding to polypeptide sequences SEQ ID NOs: 149 and 150)

[0366] v1669 has a anti-CD19 BiTE™ (VL-VH) scFv on chain A and a anti-CD3 OKT3 (VH-VL) scFv with 18 amino acid linker on chain B of the heterodimer Fc with the following mutations N297A_T350V_L351Y_F405A_Y407V on chain A and N297A_T350V_T366L_K392L_T394W on chain B. (corresponding to polypeptide sequences SEQ ID NOs: 153 and 154)

[0367] v1670 has a anti-CD19 BiTE™ (VL-VH) scFv on chain A and a anti-CD3 OKT3 (VH-VL) scFv with 10 amino acid linker on chain B of the heterodimer Fc with the following mutations N297A_T350V_L351Y_F405A_Y407V on chain A and N297A_T350V_T366L_K392L_T394W on chain B. (corresponding to polypeptide sequences SEQ ID NOs: 157 and 158)

[0368] v1671 has a anti-CD3 BiTE™ (VH-VL) scFv on chain A and a anti-CD19 BiTE™ (VL-VH) scFv on chain B of the heterodimer Fc with the following mutations N297A_T350V_L351Y_F405A_Y407V on chain A and N297A_T350V_T366L_K392L_T394W on chain B. (corresponding to polypeptide sequences SEQ ID NOs: 161 and 162)

[0369] v1672 has a anti-CD3 OKT3 (VH-VL) scFv with a 19 amino acid linker on chain A and a anti-CD19 BiTE™ (VL-VH) scFv on chain B of the heterodimer Fc with the following mutations N297A_T350V_L351Y_F405A_Y407V on chain A and N297A_T350V_T366L_K392L_T394W on chain B. (corresponding to polypeptide sequences SEQ ID NOs: 165 and 166)

[0370] Monovalent Anti-CD3 Antibodies

[0371] The following variants contain mutations to the anti-CD3 scFv that include either changes to the linker length, VH-VL orientations, or point mutations to improve stability and yeild.

[0372] v1673 has a anti-CD3 OKT3 (VL-VH) scFv (with C to S mutation at position 100A of the VH CDR3) on chain B and a Fc on chain A of the heterodimer Fc with the following mutations T350V_L351Y_F405A_Y407V on chain A and T350V_T366L_K392L_T394W on chain B. (corresponding to polypeptide sequences SEQ ID NOs: 169 and 170)

[0373] v1674 has a anti-CD3 OKT3 (VH-VL) scFv with 18 amino acid linker on chain B and a Fc on chain A of the heterodimer Fc with the following mutations T350V_L351Y_F405A_Y407V on chain A and T350V_T366L_K392L_T394W on chain B. (corresponding to polypeptide sequences SEQ ID NOs: 173 and 174)

[0374] v1798 has a anti-CD3 OKT3 (VH-VL) scFv with 10 amino acid linker on chain B and a Fc on chain A of the heterodimer Fc with the following mutations T350V_L351Y_F405A_Y407V on chain A and T350V_T366L_K392L_T394W on chain B. (corresponding to polypeptide sequences SEQ ID NOs: 177 and 178)

[0375] v1799 has a anti-CD3 OKT3 (VH-VL) scFv with 19 amino acid linker on chain A and a Fc on chain B of the heterodimer Fc with the following mutations T350V_L351Y_F405A_Y407V on chain A and T350V_T366L_K392L_T394W on chain B. (corresponding to polypeptide sequences SEQ ID NOs: 181 and 182)

[0376] Bispecific disulfide 44-100 stabilization variants

[0377] The following variants contain point mutations for disulfide stabilization at position 100 in the variable light and position 44 in the variable heavy chain (denoted 44-100SS).

[0378] v1800 has a anti-CD19 BiTE™ (VL-VH) scFv on chain A and anti-CD3 OKT3 (VL-VH) 44-100SS on chain B of the heterodimer Fc with the following mutations T350V_L351Y_F405A_Y407V on chain A and T350V_T366L_K392L_T394W on chain B. (corresponding to polypeptide sequences SEQ ID NOs: 185 and 186)

[0379] v1801 has a anti-CD19 BiTE™ (VL-VH) scFv on chain A and anti-CD3 OKT3 (VL-VH) (with C to S mutation at position 100A of the VH CDR3) 44-100SS on chain B of the heterodimer Fc with the following mutations T350V_L351Y_F405A_Y407V on chain A and T350V_T366L_K392L_T394W on chain B. (corresponding to polypeptide sequences SEQ ID NOs: 189 and 190)

[0380] v1802 has a anti-CD3 BiTE™ (VH-VL) 44-100SS scFv on chain A and anti-CD19 BiTE™ (VL-VH) scFv on chain B of the heterodimer Fc with the following mutations T350V_L351Y_F405A_Y407V on chain A and T350V_T366L_K392L_T394W on chain B. (corresponding to polypeptide sequences SEQ ID NOs: 193 and 194)

[0381] v4541 has a anti-CD3 BiTE™ (VH-VL) 44-100SS scFv on chain A and anti-CD19 BiTE™ (VL-VH) scFv on chain B of the heterodimer Fc with the following mutations D265S_L234A_L235A_T350V_L351Y_F405A_Y407V on chain A and D265S_L234A_L235A_T350V_T366L_K392L_T394W on chain B. [Polypeptide sequences correspond to SEQ ID No: 50 and 52]

[0382] Cyno/human cross-reactive anti-CD3 and anti-CD19 bispecific Fc knock-out variants with or without disulfide 44-100 stabilization

[0383] v4542 has a cyno/human cross-reactive anti-CD3 BiTE™ 12C (VH-VL) scFv on chain A and cyno/human cross-reactive anti-CD19 MOR208 (VH-VL) scFv on chain B of the heterodimer Fc with the following mutations D265S_L234A_L235A_T350V_L351Y_F405A_Y407V on chain A and D265S_L234A_L235A_T350V_T366L_K392L_T394W on chain B. [Polypeptide sequences correspond to SEQ ID No: 54 and 56].

[0384] v4543 has a cyno/human cross-reactive anti-CD3 BiTE™ 12C (VH-VL) 44-100SS scFv on chain A and cyno/human cross-reactive anti-CD19 MOR208 (VH-VL) 44-100SS scFv on chain B of the heterodimer Fc with the following mutations D265S_L234A_L235A_T350V_L351Y_F405A_Y407V on chain A and D265S_L234A_L235A_T350V_T366L_K392L_T394W on chain B. [Polypeptide sequences correspond to SEQ ID No: 58 and 60]

[0385] v4544 has a cyno/human cross-reactive anti-CD3 BiTE™ 12C (VH-VL) scFv on chain A and cyno/human cross-reactive anti-CD19 MOR208 (VL-VH) scFv on chain B of the heterodimer Fc with the following mutations D265S_L234A_L235A_T350V_L351Y_F405A_Y407V on chain A and D265S_L234A_L235A_T350V_T366L_K392L_T394W on chain B. [Polypeptide sequences correspond to SEQ ID No: 62 and 64]

[0386] v4545 has a cyno/human cross-reactive anti-CD3 BiTE™ 12C (VH-VL) 44-100SS scFv on chain A and cyno/human cross-reactive anti-CD19 MOR208 (VL-VH) 44-100SS scFv on chain B of the heterodimer Fc with the following mutations D265S_L234A_L235A_T350V_L351Y_F405A_Y407V on chain A and D265S_L234A_L235A_T350V_T366L_K392L_T394W on chain B. [Polypeptide sequences correspond to SEQ ID No: 66 and 68]

[0387] v4546 has a cyno/human cross-reactive anti-CD3 BiTE™ 12C (VH-VL) scFv on chain A and cyno/human cross-reactive anti-CD19 MDX-1342 (VH-VL) scFv on chain B of the heterodimer Fc with the following mutations D265S_L234A_L235A_T350V_L351Y_F405A_Y407V on chain A and D265S_L234A_L235A_T350V_T366L_K392L_T394W on chain B. [Polypeptide sequences correspond to SEQ ID No: 70 and 72]

[0388] v4547 has a cyno/human cross-reactive anti-CD3 BiTE™ 12C (VH-VL) 44-100SS scFv on chain A and cyno/human cross-reactive anti-CD19 MDX-1342 (VH-VL) 44-100SS scFv on chain B of the heterodimer Fc with the following mutations D265S_L234A_L235A_T350V_L351Y_F405A_Y407V on chain A and D265S_L234A_L235A_T350V_T366L_K392L_T394W on chain B. [Polypeptide sequences correspond to SEQ ID No: 74 and 76].

[0389] v4548 has a cyno/human cross-reactive anti-CD3 BiTE™ 12C (VH-VL) scFv on chain A and cyno/human cross-reactive anti-CD19 MDX-1342 (VL-VH) scFv on chain B of the heterodimer Fc with the following mutations D265S_L234A_L235A_T350V_L351Y_F405A_Y407V on chain A and D265S_L234A_L235A_T350V_T366L_K392L_T394W on chain B. [Polypeptide sequences correspond to SEQ ID No: 78 and 80]

[0390] v4549 has a cyno/human cross-reactive anti-CD3 BiTE™ 12C (VH-VL) 44-100SS scFv on chain A and cyno/human cross-reactive anti-CD19 MDX-1342 (VL-VH) 44-100SS scFv on chain B of the heterodimer Fc with the following mutations D265S_L234A_L235A_T350V_L351Y_F405A_Y407V on chain A and D265S_L234A_L235A_T350V_T366L_K392L_T394W on chain B. [Polypeptide sequences correspond to SEQ ID No: 82 and 84]

[0391] The antibodies and antibody controls were cloned and expressed as follows. The genes encoding the antibody heavy and light chains were constructed via gene synthesis using codons optimized for human/mammalian expression. The Fab sequences were generated from a known Her2/neu binding Ab (Carter P. et al. (1992) Humanization of an anti P185 Her2 antibody for human cancer therapy. Proc Natl Acad Sci 89, 4285.) and the Fc was an IgG1 isotype. The scFv-Fc and OAA sequences, were generated from a known anti-CD3 and CD19 scFv Bite antibodies (Kipriyanov et. al., 1998, Int. J Cancer: 77,763-772), anti-CD3 BiTE antibodies (US2011/0275787) anti-CD3 monoclonal antibody OKT3 (Drug Bank reference: DB00075), anti-CD19 anitbody MDX-1342 (WO2009054863; WO2007002223).

[0392] The final gene products were sub-cloned into the mammalian expression vector pTT5 (NRC-BRI, Canada) and expressed in CHO cells (Durocher, Y., Perret, S. & Kamen, A. High-level and high-throughput recombinant protein production by transient transfection of suspension-growing CHO cells. Nucleic acids research 30, E9 (2002)).

[0393] The CHO cells were transfected in exponential growth phase (1.5 to 2 million cells/mL) with aqueous 1 mg/mL 25 kDa polyethylenimine (PEI, Polysciences) at a PEI:DNA ratio of 2.5:1.(Raymond C. et al. A simplified polyethylenimine-mediated transfection process for large-scale and high-throughput applications. Methods. 55(1):44-51 (2011)). In order to determine the optimal concentration range for forming heterodimers, the DNA was transfected in optimal DNA ratios of the heavy chain A (HC-A), light chain (LC), and heavy chain B that allow for heterodimer formation (e.g. HC-A/HC-B/ratios=50:50% (OAAs; HC/Fc), 50:50%. Transfected cells were harvested after 5-6 days with the culture medium collected after centrifugation at 4000 rpm and clarified using a 0.45 μm filter.

[0394] The clarified culture medium was loaded onto a MabSelect SuRe (GE Healthcare) protein-A column and washed with 10 column volumes of PBS buffer at pH 7.2. The antibody was eluted with 10 column volumes of citrate buffer at pH 3.6 with the pooled fractions containing the antibody neutralized with TRIS at pH 11. The protein was finally desalted using an Econo-Pac 10DG column (Bio-Rad).

[0395] In some cases, the protein was further purified by protein L chromatography by the method as follows. Capto L resin PBS was equilibrated with PBS and protein A purified v875, neutralized with 1 M Tris, was added to resin and incubated at RT for 30 min. Resin washed with PBS and flow through collected, bound protein was eluted with 0.5 ml 0.1 M Glycine, pH 3.

[0396] In some cases, the protein was further purified by gel filtration, 3.5 mg of the antibody mixture was concentrated to 1.5 mL and loaded onto a Superdex 200 HiLoad 16/600 200 pg column (GE Healthcare) via an AKTA Express FPLC at a flow-rate of 1 mL/min. PBS buffer at pH 7.4 was used at a flow-rate of 1 mL/min. Fractions corresponding to the purified antibody were collected, concentrated to ˜1 mg/mL and stored at −80° C.

[0397] The transient expression of exemplary v873, 874, 875 and other azymetric antibodies compared to the reference v891 is shown in FIG. 7. The SDS-PAGE in FIG. 7 shows that all examplary heteromultimer can be expressed transiently in CHO3E7 cells with a cell viability of >80%.

### Example 3

### Heteromultimer v873 is Able to Bridge Jurkat CD3 T Cells and Raji CD19 B Cells

[0398] The ability of v873 to bridge T cells and B cells was tested by FACS analysis as follows.

[0399] Whole Cell Bridging by FACS

[0400] 1×10⁶ cells/ml suspended in RPMI were labeled with 0.3 μM of the appropriate CellTrace label and mixed and incubated at 37° C. in a water bath for 25 minutes

[0401] Pellets were resuspended in 2 ml of L10+GS1+NaN3 to a final concentration 5×106 cells/mi.

[0402] Cell suspensions were analyzed (1/5 dilution) by flow cytometry to verify the appropriate cell labeling and laser settings. Flow-check and flow-set Fluorospheres were used to verify instrument standardization, optical alignment and fluidics.

[0403] After flow cytometry verification, and prior to bridging, each cell line was mixed together at the desired ratio, at a final concentration of 1×10⁶ cells/ml.

[0404] T:T bridging was assessed with Jurkat-violet+Jurkat-FarRed, B:B was assessed with RAJI-violet+RAJI-FarRed and T:B bridging was assessed with Jurkat-violet+RAJI-FarRed.

[0405] Antibodies were diluted to 2× in L10+GS1+NaN3 at room temperature then added to cells followed by gentle mixing and a 30 min incubation.

[0406] Following the 30 min incubation 2 μl of propidium iodide was added and slowly mixed and immediately analyze by flow cytometry.

[0407] Bridging % was calculated as the percentage of events that are simultaneously labeled violet and Far-red.

[0408] FIG. 1B shows the ability of v873 and blinatumomab CD19-CD3 BiTE (v891, MT-103) to bridge Jurkat CD3 T cells (Top left quadrant) with Raji CD19 B cells (bottom right quadrant) by FACS. Bridged T-B cells appear in top right quadrant. This result demonstrates that at 300 nM, heteromultimer v873 is able to specifically bridge Jurkat T cells and Raji B cells to a similar extent (23% of total cells) as BiTE (21% of total cells).

### Example 4

### Heteromultimers Bind Selectively to CD3- and CD19-Expressing Cells

[0409] The ability of an exemplary heteromultimer, v873, to bind specifically to CD3 and CD19 was assessed by FACS. One-armed antibodies (OAAs) against CD3 and CD19 were also prepared as described in Example 2 and tested as controls in the whole cell FACS binding assay described below.

[0410] Whole Cell Binding by FACS Protocol:

[0411] 2×10⁶cells/ml cells (>80% viability) were resuspended in L10+GS1 media, mixed with antibody dilutions, and incubated on ice for 1 h.

[0412] Cells were washed by adding 10 ml of cold R-2 buffer, and centrifuging at 233 g for 10 min at 4° C. The cell pellet was resuspended with 100 μl (1/100 dilution in L10+GS1 media) of fluorescently labeled anti-mouse or anti-human IgG and incubated for 1 h at RT.

[0413] Cell treatments were washed by adding 10 ml of cold R-2 as previously described, and the cell pellet resuspended with 400 μl of cold L-2 and the sample was filtered through Nitex and added to a tube containing 4 μl of propidium iodide.

[0414] Samples were analyzed by flow cytometry.

[0415] The results are shown in FIG. 2 and demonstrate that v873 is able to selectively bind and bridge to CD3-expressing Jurkat T cells (lower panel) and to CD19-expressing Raji B cells (upper panel). FIG. 2 also demonstrates that the one-armed anti-CD3 antibody specifically binds to Jurkat T cells and does not cross-react to CD19 expressing B cells, and that the one-armed anti-CD19 antibody specifically binds to Raji B cells and does not cross-react to Jurkat T cells.

[0416] This experiment was repeated and results are shown in FIG. 9. As in the previous experiment, the FACS assay shows that v873 binds selectively to Jurkat T-cells and to Raji B-cells (FIG. 9 B). FIG. 9A shows that human IgG (hIgG) does not bind to Jurkat T-cells and has low level binding to Raji B-cells, as expected due to the interactions between the hIgG Fc and CD32B on the Raji B-cells. FIG. 9A also shows that the anti-CD19 OAA binding selectively to the Raji B-cells and does not cross-react to Jurkat T cells.

[0417] The FACS assay was also carried out to confirm that v873 does not bind to control cell lines that do not express CD3 or CD19. FIG. 10 shows that v873 does not bind to the K562 cell line, which does not express CD19 or CD3. FIG. 11 shows that v873 also does not bind to mouse lymphoid cells which does not express CD19 or CD3.

### Example 5

### Heteromultimers Mediate PBMC Killing of Target Raji B Cells

[0418] In preliminary experiments, the ability of an exemplary heteromultimer, v873, to mediate T cell cytoxicity against target Raji B-cells was measured using IL-2-stimulated PBMCs as follows.

[0419] Human blood (120-140 mL) for individual studies was collected on two subsequent days from selected donors. On both days, PBMC were freshly isolated from donors and where needed a portion of the PMBC were passed through EasySep (STEMCELL Technologies Inc.) columns for CD4+ and CD8+ enrichment. On the first day, the PBMCs and the enriched fractions were activated with 1000-3000 units per mL of IL-2 with an overnight incubation. The culture was processed with a negative selection column to isolate activated CD4+ and CD8+ cells. Cells were then labeled and analyzed by cytometry to evaluate the contents of CD69+ cells in the preparations. The PBMCs and the enriched fractions from the second day were used in the assay as is without IL-2 activation or in resting state.

[0420] Resting and IL-2 activated PBMCs and purified CD4+ and CD8+ were used as effector cells and Raji human B cells as target cells in the cytotoxicity assay. An effector:target ratio of 30:1 for PBMCs and 15:1 was tested for purified CD4+ and CD8+. The PBMC were also tested in presence of het-FC at 20 ug/mL and cell cytotoxicity was assayed at various concentrations of test items.

[0421] After incubating the cells with test articles for 20-26 hours, 50 uL of cell culture supernatant was collected for LDH analysis using a Promega LDH enzyme kit. In some studies, autologous T and B cells and/or allogenic B cells were assessed for their respective proportions in the culture and their 7AAD+ cell contents

[0422] CFSE was used and tested as a differential label between Raji and autologous B cells. Raji target cells were pre-labeled with minimal amounts of CFSE before the incubation with effectors, with or without test items. The cell pellets were resuspended in various antibody cocktails for flow cytometry analysis. A Guava 8HT flow cytometer was used for analysis of cell subpopulations. All antibodies were obtained from BD biosciences unless specified.

[0423] Each condition tested included appropriate controls; wells with all effector and target cell types separately, for all donors, incubated with all test items at all concentrations used in the potency assay.

[0424] To avoid any hindrance between binding of the test items to their targets (CD3 and CD19), markers used for B and T cell staining were anti-CD20 and anti-CD7, respectively for the study shown in FIG. 23. This assay was performed with resting and IL2-activated PBMCs, purified CD4+ and CD8+ T cells.

[0425] Data Analysis:

[0426] For LDH analysis, optical densities (OD) at 490 nm were determined for each well using a Molecular Devices Emax. Data analysis was performed using LibreOffice Calc software. The following analysis scheme is applied to calculate the cytotoxic response:

[0427] First, the averaged culture medium background signal (OD values) is subtracted from all wells before evaluating cytotoxic response. For detergent induced maximum release of pure target cells, a volume corrected specific background signal accounting for the presence of detergent is used and subtracted from maximum release OD values.

[0428] The spontaneous release of effectors and target combined is obtained from wells without any test items, for each effector population tested: the PBMCs, CD4 and CD8 negatively selected populations. The background LDH activity of the test system is better evaluated in wells containing the experimental mixture of effectors-target populations without any test item present.

[0429] Between all plates of all donors, spontaneous and maximum LDH release from Raji cells, media control wells, and LDH positive control wells were used to monitor inter plate variations.

[0430] FIG. 3A depicts the ability of v873 to redirect IL-2 activated PBMC to kill target Raji B cells from 3 donors. FIG. 3B demonstrates that v873 is able to mediate higher redirected T-cell cytotoxicity than v891 in one of the donors. These preliminary results indicate that heteromultimers as exemplified by v873 may be able to mediate higher T-cell cytotoxicity than v891.

[0431] The ability of v873 to mediate PBMC killing of Raji B cells in 3 donors compared to human IgG1 control was assessed. The methods for this experiment follow that outlined in Example 5, with the following modifications: IL-2 stimulation of PBMC was tested at 1000-3000 units per mL.

[0432] The results shown in FIG. 8 indicated that v873 induces are higher % cytotoxicity to target B cells when compared to negative control human IgG1 (G1) when comparing across individual donors. In some cases, stimulation with a higher concentration of IL-2 at 3000 units per mL, resulted in higher % cytotoxicity to target B cells.

### Example 6

[0433] Heteromultimers mediate redirected killing of target Raji B cells with resting and IL-2 activated CD4+ and CD8+ T cells

[0434] The ability of an exemplary heteromultimers, v875, v1379, v1380 to mediate CD4+ and CD8+ T cell cytoxicity against target Raji B-cells was measured as described in Example 5.

[0435] FIG. 16A depicts the ability of v875, v1379 and v1380 to mediate antibody dependent B cell cytoxicity by redirected CD4+ and CD8+ T cell towards Raji B cells. The top panel of FIG. 16 illustrates the cytoxicity of resting CD4+ and CD8+ T cells towards Raji B cells. These results illustrate that v875, v1380 and v891 ellicit a concentration dependant cytotoxic response that is more prominent in the CD8+ T cells. The lower panel of FIG. 16 illustrates that the cytoxicity of IL-2 stimulated CD4+ and CD8+ T cells towards target Raji B cells. These results indicate that v875 and v1379 ellicit similar Raji B-cells cytoxicity compared to v891 with IL-2 activated CD8+ effector T cells. In all cases, a greater cytotoxic response was elicted with the IL-2 activiated CD8+ T cells compared to the IL-2 activated CD4+ T cells. These results also indicate that the FcGr knock-out variant, v1380, is cytotoxic toward target Raji B cells, but is slightly less effective (ca. 40% max cytotoxicity) compared to v875 and v1379 (ca. 60% max) that have WT heterodimers Fc.

[0436] FIG. 16 B-E depict representations of the data in FIG. 16A normalized to human IgG, for v875 (FIGS. 16B and C), and v1379 and v1380 (FIGS. 16D and E), and include % cytotoxicity indicated at each test antibody concentration. FIG. 16B shows the % cytotoxicity to target Raji B cells with v875 with IL-2 activated CD4+ and CD8+ effector T cells. FIG. 16C shows the % cytotoxicity to target Raji B cells with v875 with resting CD4+ and CD8+ effector T cells. FIG. 16D and E show direct comparisons of v1379 (WT Fc) and v1380 (L234A_L235A Fc knockout) in IL-2 activated (FIG. 16D), and resting (FIG. 16E) CD4+ and CD8+ T cells. The most signicant impact of the L234A_L235A Fc knockout (v1380) to target B cell cytotoxicity is seen in the IL-2 activated CD8+ T cell population (FIG. 16D, left panel), where v1380 is less cytotoxic compared to v1379.

[0437] The experiment was repeated as shown in FIGS. 19 with v875, v873 and human IgG, using resting (FIG. 19A) and IL-2 activated CD8+ T cells (FIG. 19B) as effectors cells targeting Raji B cells. FIG. 19A shows that v875 and v873 elicit >30% cytotoxicity to target Raji B cells with IL-2 activiated CD8+ T cells as effectors, and maximal target cell killing is seen at the 3 nM concentration. FIG. 19B shows that v875 and v873 elicit dose dependent (>20%) cytotoxicity to target Raji B cells with resting CD8+ T cells as effectors. Greater target Raji B cell killing is seen when IL-2 activated CD8+ T cells were used as the effector cells.

[0438] The experiment was repeated as shown in FIG. 20 to compare the relative contributions of CD4+ and CD8+ T cell killing to target Raji B cells at v875 concentations ranging from 0.06-10.0 nM. FIG. 20A shows the target Raji B cell cytotoxicty of v875 with IL-2 activated CD4+ and CD8+ T cells. The percent target B cell killing elicited with IL-2 activated CD4+ cells and CD8+ T cells, did not increase at v875 concentrations above the 0.06 nM. As expected, target B cell killing is greater with IL-2 activated CD8+ T cells, compared to IL-2 activated CD4+ T cells. FIG. 20B shows the target Raji B cell cytotoxicty of v875 with resting CD4+ and CD8+ T cells. The percent target B cell killing elicited with resting CD8+ cells does not increase greatly at v875 concentrations above 0.1 nM. Dose-dependent B cell killing is seen with v875 and v873 when CD4+ and CD8+ effector T cells are used. As expected, target B cell killing is greater with resting CD8+ T cells, compared to resting CD4+ T cells.

### Example 7

### The Heterodimeric Fc Contributes to Target Raji B Cell Cytotoxicity

[0439] The ability of exemplary heteromultimers, v875, and v873, to mediate target Raji B-cell cytotoxicity in the presence and absence of Fc was measured as described in Example 5.

[0440] FIG. 17 depicts v875 and v873 Azymetric antibody mediated IL-2 activated PBMC and target Raji B cell cytotoxicity in the presence or absence of Fc blocking as determined by LDH assay. FIG. 17A illustrates that Fc blocking of IL-2 activated PBMC results in a minor (v875) or no (v873) reduction in the % cytotoxicity of target Raji B cells. FIG. 17B illustrates that Fc blocking of resting PBMC results in a reduction in the % cytotoxicity of target Raji B cells for v875 and v873.

[0441] The experiment was repeated and the results shown in FIG. 18. FIG. 18A illustrates that Fc blocking of IL-2 activated PBMC results in a reduction in the % cytotoxicity of target Raji B cells at all antibody concentrations tested for v875 and v873. FIG. 18B illustrates that Fc blocking of resting PBMC results in a reduction in the % cytotoxicity of target Raji B cells at all antibody concentrations tested for v875 and v873. FIGS. 17 and 18 show that the Fc contributes to target Raji B cell cytotoxicity in the heterodimeric v875 and v873 antibodies.

### Example 8

### Heteromultimers Mediate Autologous B Cell Cytotoxicity

[0442] The ability of exemplary the heteromultimer v875 and v873 to kill autologous B-cells was measured in total and resting IL-2-stimulated PBMCs where the percent of CD19+ 7AAD+ cells following incubation with v875 and v873 (300 nM, n=3 donors) was determined by flow cytometry as described in Example 5.

[0443] FIG. 21 shows, relative to untreated media and human IgG controls, that v875 and v873 (300 nM) mediate autologous B cell killing in total resting PBMC (left panel) and total IL-2 activated PBMC.

### Example 9

### Heteromultimer v875 Spares Autologous T Cell Cytotoxicity Compared to BiTE

[0444] The effects of exemplary heteromultimer v875 and v873 treatment on the autologous T cell population was assesed in total and resting IL-2-stimulated PBMCs where the percent of CD3+ 7AAD+ cells following incubation with v875 and v873 (300 nM, n=3 donors) was determined by flow cytometry as described in Example 5.

[0445] FIG. 22 shows, relative to untreated media and human IgG controls, v875 has a more selective B cell killing by sparing more autologous T cells compared to v873 and v891.

### Example 10

### Design, Expression and Purification of Heteromultimers with an Albumin Scaffold

[0446] The following exemplary CD3-CD19 binding heteromultimers based on an albumin scaffold were designed and prepared as follows.

[0447] The sequences for the anti-CD19 and anti-CD3 scFvs were chosen from two molecules that are currently in clinical trials and are well documented and tested for stability and production. The anti-CD19 and anti-CD3 scFv were directly adopted from the BiTE molecule blinatumomab. The antiCD3 scFv was chosen in the VH-VL orientation, consistent with what used in BiTE. The benchmark molecule was an scFv molecule based on BiTE (v891). AlbuCORE_{—}1 (ABH2) CD3/CD19 fusions were created by attaching the antiCD3 warhead to the natural N terminus of fragment 1 and the antiCD19 to the C terminus of fragment 2 (v1092, polypeptide sequences corresponding to SEQ ID NO:264 and 266). The linkers used were identical to the ones used for the multivalent HER2 AlbuCORE experiments: GGGS at the N terminus of fragment 1 and (GGSG)₄GG at the C terminus of fragment 2. A second molecule was created where the warheads were reversed (i.e. anti-CD19 warhead at the natural N terminus of fragment 1 and the anti-CD3 at the C terminus of fragment 2, v1093. v1094 was designed to accommodate two different fusions at the natural termini of the albumin polypeptide (polypeptide sequences corresponding to SEQ ID NO:268). The scFv fusions were linked to the albumin molecule through a GGS linker at the N terminus and a GGSG linker at the C terminus. The length of the linkers reflect the ones used in the MM-111 molecule, despite having a different sequence type.

[0448] V221 is the albumin-based heteromultimer used to construct v1092, but without the cargo molecules (polypeptide sequences corresponding to SEQ ID NO:269 and 270).

[0449] Expression and purification were performed as previously described for the multivalent HER2.

### Example 11

### Heteromultimers with an Albumin Scaffold Bind Specifically to CD3- or CD19-Expressing Cells

[0450] The ability of Anti-CD3×CD19 loaded AlbuCORE-1 (v1092) to CD3⁺ and CD19⁺ cells was assessed using FACS and compared to WT-HSA loaded with the same anti-CD scFvs (v1094).

[0451] The results are shown in FIG. 4 and demonstrate that both v1092 and v1094 are able to bind to CD3-expressing Jurkat T-cells and to CD19-expressing Raji B-cells.

### Example 12

### Heteromultimers with Heterodimeric Fc or Albumin Scaffolds Show Comparable B-Cell Targeting and T-Cell Bridging

[0452] The ability of heteromultimers with different scaffolds to direct B-cell targeting and T-cell bridging was compared by FACS analysis, according to the method described in Example 3. The v1092 construct was additionally tested against v873 and the v891 BiTE control for B-cell and T-cell binding according to the method described in Example 4.

[0453] The results are shown in FIG. 5A and indicate that at the concentration tested, v1093 was able to bridge 31% of total cells, and v873 was able to bridge 25% of total cells (lower panels). The upper panels are the results using media as a control. As described in Example 3, the ability of v873 to bridge B-cells and T-cells is comparable to that of the v891 BiTE control. FIG. 5A further indicates that the ability of v1093 to bridge B-cells and T-cells is comparable to that of v873.

[0454] In an additional experiment, the ability of v1092 to bridge T-cells and B-cells was directly compared to the v221 control and to v873 and the v891 control. The results are shown in FIG. 5B which demonstrates that v1092 is able to bridge Jurkat T cells and Raji B cells to a greater extent than v221 and similar to v891 and v873.

### Example 13

### Exemplary Heteromultimers have Higher Anti-CD3 KD and Higher Bmax in Binding to T and B Cell as Determined by FACS

[0455] The K_{D} of exemplary heteromultimers, v873 and v875, was assessed by FACS as described as described in Example 4 with data analysis and curve fitting performed in GraphPad Prism.

[0456] The results of this experiment are shown in FIG. 12 and indicate that both v873 and v875 have a higher anti-CD3 affinity compared to v891. The KD for v873 and v875 binding to CD19 expressing Raji cells is similar across all antibodies and is comparable to v891. FIG. 12 A and B show FACS binding curves of v873, v875 and v891 to CD3 expressing HPB-ALL and Jurkat T cells, and to CD19 expressing Raji B cells. FIG. 12 B also illustrates the v875 has a higher Bmax for binding to Raji B cell and Jurkat T cells when compared to v891. Table 1 summarises the KD values for v875, v873, and v891 binding to HPB-ALL, Jurkat and Raji cells.

TABLE 1
KD summary of T and B cell binding determined by FACS

| | | HBP- | |
|---|---|---|---|
| | Jurkat | ALL Binding | Raji |
| | Binding (nM) | (nM) | Binding (nM) |
| v873 | 9.3 ± 0.6 | 11.2 ± 1.0 | 2.7 ± 0.5 |
| v875 | 4.5 ± 0.003 | 4.7 ± 0.3 | 4.5 ± 0.9 |
| v891 | NA | 64.5 ± 70.3 | 2.7 ± 1.2 |

[0457] The K_{D} of exemplary heteromultimers v875, v1379, v1380, v1381, and v891 was assessed for binding to CD19 expressing Raji cells by FACS as described as described in Example 4 with data analysis and curve fitting performed in GraphPad Prism.

[0458] The results of this experiment are shown in FIG. 13 A and Table 2 and indicate that heteromultimers v875, v1379, v1380, v1381, and v891 have a similar KD for binding to CD19 expressing Raji cells. FIG. 13A illustrates the FACS binding curve obtained with the antibodies tested in 0.1 to 300 nM range. Table 2 summaries the derived KD in nM, Bmax and Hill slope obtained from the FACS binding experiment. FIG. 13A also shows that all heteromultimers tested have a higher Bmax for binding to CD19 expressing Raji cells compared to BiTE.

TABLE 2
Summary of binding properties of heteromultimers to Raji B cells

| | 875 | 1379 | 1380 | 1381 | 891 |
|---|---|---|---|---|---|
| max | 3140 | 0978 | 955 | 3892 | 153 |
| ill slope | .9789 | .067 | .230 | .206 | .072 |
| D | .491 | .124 | .946 | .360 | .841 |

[0459] The results of the FACS binding to HBP-ALL T cells are shown in FIG. 13B and Table 3 and indicate that heteromultimers v875, v1379, v1380, have a lower KD compared to v891. FIG. 13B illustrates the FACS binding curve obtained with the antibodies tested in 0.1 to 300 nM range. Table 3 summaries the derived KD in nM, Bmax and Hill slope obtained from the FACS binding experiment. FIG. 13B also shows that all heteromultimers tested have a higher Bmax for binding to HBP-ALL compared to v891.

TABLE 3
Summary of binding properties of heteromultimers to HBP-ALL T cells

| | 875 | 1379 | 1380 | 1381 | KT3 | 891 |
|---|---|---|---|---|---|---|
| max | 7118 | 7997 | 0420 | 9557 | 3339 | 295 |
| ill slope | .099 | .104 | .296 | .9148 | .195 | .8300 |
| D | 9.05 | 7.89 | .547 | 08.4 | .4607 | 68.4 |

### Example 14

### Heteromultimer v875 is Able to Bridge Jurkat CD3 T Cells and Raji CD19 B Cells

[0460] The ability of the heteromultimer, v875, to bridge T cells and B cells was tested by FACS analysis as described in Example 3.

[0461] The results of this experiment are shown in FIG. 14 and indicate that both v875 and v891 facilitate comparable bridging between Raji B-cells and Jurkat T-cells. Use of the control human IgG resulted in 2.5% bridging between Raji and Jurkat cells, while v875 facilitated bridging of 22.9% of total cells, and v891 facilitated bridging of 14.5% of total cells. These results were also presented as fold bridging over background, where v875 mediated a 9.2-fold increase in bridging over background, while v891 mediated a 5.8-fold increase in bridging over background.

### Example 15

### Bridging of B and T Cells by Heteromultimers is Robust at Varying Antibody Concentrations or Cell Ratios

[0462] The ability of v875 to bridge B and T cells at varying concentrations was assessed by FACS as described in Example 3 with modifications including changes to the effector to target (E:T) cell ratios (1:1 or 15:1) at three different concentrations of v875.

[0463] The results are shown in FIGS. 15A and 15B. FIG. 15A shows the amount of bridging using a 1:1 ratio of T-cells to B-cells, with heteromultimer concentrations ranging from 0.3 nM to 3 nM. FIG. 15B shows the amount of bridging using a 15:1 ratio of T-cells to B-cells, with heteromultimer concentrations ranging from 0.3 nM to 3 nM. Both E:T ratios (1:1 and 15:1) tested with v875 resulted in similar total T cell-B cell bridging when expressed as fold over background.

### Example 16

### Bridging of B and T Cells is Robust Across Differently Engineered Heteromultimers Constructs

[0464] The ability of v875 to bridge Raji B and Jurkat T cells (B:T), as well Raji:Raji B cell bridging (B:B) and Jurkat:Jurkat T cell bridging (T:T) was assessed by FACS as described in Example 3.

[0465] The results are shown in FIGS. 35A, 34B and 34C. FIG. 34A shows the amount of T:B, B:B and T:T bridging of v875, v1379, v1380, v891, v1381, commercial OKT3 and human IgG over three experimental replicates. These results show that all heterodimeric antibodies mediate a high percentage of T:B bridging and that all variants have a % T:B bridging that is higher than v891. These results also show a low percentage of T:T and B:B bridging relative to the % T:B bridging for all variants.

[0466] FIG. 34B shows the amount of T:B, B:B and T:T bridging of variants with engineered anti-CD3 warheads for stability enhancement (v1653, v1654, v1655, v1656, v1660, v1800, v1802) and v875, and human IgG. These results show that all heterodimeric antibodies (v875, v1653, v1654, v1655, v1656, v1660, v1800, v1802) mediate a higher percentage of T:B bridging compared to human IgG negative control, and all variants mediate low T:T bridging. These results also show that some variants (v1660, v1654 and v1655) mediate higher B:B bridging relative to T:B bridging.

[0467] FIG. 34C shows the amount of T:B, B:B and T:T bridging of Fc knock-out variants that have either engineered anti-CD3 warheads for stability enhancement (v1666), or have human/cynomolgous monkey cross-reactive anti-CD3 and anti-CD19 scFvs (v4541, v4543, v4545, v4548) commercial OKT3 anti-CD3 control, v2176 anti-CD19 control and human IgG negative control, and all variants mediate low T:T bridging. These results show that all heterodimeric antibodies (v1666, v4541, v4543, v4545, v4548) mediate a higher percentage of T:B bridging compared to human IgG negative control. These results also show that some variants (v1666, v4548) mediate higher B:B bridging relative to T:B bridging.

### Example 17

### Effects of v875, v1380, v1379 on IL-2 Activated and Resting CD20+, CD4+, CD8+ Subsets

[0468] The effects of v875, v1379 and v1380 treatment on the viability of CD20+, CD4+, CD8+ subsets in IL-2 activated or resting T and B cell cultures, was examined by 7AAD+ staining and FACS and normalized to isotype control (n=4 donors), as described in Example 5.

[0469] The results are shown in FIG. 23, and illustrate that the exemplary heteromultimers v875, v1379 and v1380, mediate CD20+ B cell cytotoxicity but not CD4+ or CD8+ T cell cytotoxocity relative to the human IgG control. FIG. 23A shows the effects of v875 on the viability of CD20+, CD4+, CD8+ subsets in IL-2 activated cell cultures. FIG. 23B shows the effects of v875 on the viability of CD20+, CD4+, CD8+ subsets resting cell cultures. FIG. 23C shows the effects of v1379 and v1380 on the viability of CD20+, CD4+, CD8+ subsets in IL-2 activated cell cultures. FIG. 23D shows the effects of v1379 and v1380 on the viability of CD20+, CD4+, CD8+ subsets resting cell cultures. The contribution of the WT Fc to CD20+ B cell cytotoxicity is also show in FIGS. 23C and D, where v1379 mediates a greater to CD20+B cell cytotoxicity in both IL-2 activated and resting CD4+ and CD8+ T cells.

### Example 18

### Exemplary Heteromultimers v875 and v873 Require the Presence of Both Effector T Cell and Target B Cells to Mediate Cytotoxic Effects

[0470] The impact of incubating v875 and v873 alone with either effector or target cells was assessed by LDH release as described in Examples 5 with the following modifications. A total of 300,000 resting and IL-2 activated PBMC, 150,000 CD8+ effector cells or 10,000 Raji target cells were incubated overnight with each of the antibodies at 300 nM, along with a control without test item for each condition. The data presented is the averaged results from the 3 donors

[0471] The results of antibody mediated LDH release in resting effector and Raji B cells shown in FIG. 24A and the results of antibody mediated LDH release in activiated effector are shown in FIG. 24B. FIG. 24A shows that v875 and v873 are not cytotoxic to CD8+ T cell populations relative to the untreated media and human IgG control. FIG. 24A also shows that v875 and 873 increase the cytoxoicity in total PBMC populations, likely due to the redirected killing of effector T cells to target B cells. Additonally, FIG. 24A shows that in the absence of effector T cells, v875 and v873 are not cytotoxic to Raji B cell populations relative to the media and human IgG control.

[0472] FIG. 24B shows the results of v875 and v873 mediated LDH release in activated effector PBMC and CD8+ T cells. These results show an increase in cell death when v875 and v873 are incubated with activated PBMC like due to the redirected B cell killing mediated by the heterdimeric antibodies in the presence of effector T and target B cells. FIG. 24B also shows that incubation of v875 with activated CD8+ T cells, results in a higher percentage of cell death relative to v873 and the media and human IgG controls.

### Example 19

### Exemplary Heteromultimers can Mediate ADCC or Impaired ADCC to Target Daudi B Cells

[0473] Antibody-dependent cell-mediated cytotoxicity assays (ADCC) were performed with v875, v1379 and v1380 using Daudi cells as target B cells and FcRγ3a immobilized NK92 cells as the effector cells (GS193761) by the following method.

[0474] Dose-response studies were performed with various concentrations of the samples with a pre-optimized Effector/Target (E/T) ratio (5:1). Triton X-100 was added to cell controls without effector cells and antibody in a final concentration of 1% to lyze the target cells and it served as the maximum lysis control; assay buffers were added in to cell controls without effector cells and antibody and it served as the minimum LDH release control. Target cells incubated with effector cells without the presence of antibodies were set as background control of non-specific LDH release when both cells were incubated together.

[0475] Test article was incubated with cells at 37° C./5% CO2 for 5-6 hours and cell viability was assessed with a LDH kit. The absorbance was read at OD492 nm and OD650 nm. The percentages of cell lysis (OD492 nm) were calculated according the formula below:

Cell lysis %=100*(1−(ODSample data−ODtumor cells plus effector cells)/(ODMaximum release−ODMinimum release)).

[0476] Half maximal effective concentration (EC50) values were analyzed with the Sigmoidal dose-response non-linear regression fit by GraphPad Prism.

[0477] The results are shown in FIG. 25A and B, and illustrate that heteromultimers with a WT Fc (v875 and v1379) can mediate ADCC (ca. 40% max cell lysis), whereas v1380, with a L234A_L235A knock Fc mutation, is impaired in ADCC to target Daudi B cells. In FIGS. 25 A and B, comparison to the internal positive control, Rituximab, are presented.

### Example 20

### Exemplary Heteromultimers have Impaired CDC-Mediated Lysis of Daudi B Cells

[0478] Cell based complement dependent cytotoxicity assays (CDC) were performed with v875, v1379 and v1380 using Daudi cells as target B cells. Human serum from healthy donors (NHS) was used as the source of complement. 10 μl NHS (10% final concentration in 40 reaction volume) were added to each well to initiate the CDC cascade and incubated for 2 hours. Cell viability was measured with CellTiter-Glo® Luminescent Cell Viability Assay Kit.

[0479] The percentage of cell viability was calculated with the formula:

% Cell viability=100×((RLUsample)/(RLUcell+NHS))

in which NHS stands for normal human serum. Half maximal effective concentration (EC50) values were analyzed with the Sigmoidal dose-response non-linear regression fit by GraphPad Prism.

[0480] FIG. 25C and D show the results of the CDC assay with v1380 and v1379 (FIG. 25C) and v875 (FIG. 25D) of target Daudi B cells with comparisons to positive control Rituximab. All heteromultimers show impaired CDC relative to Rituximab, and mediate a maximum target cell lysis of 15% or less.

### Example 21

### Cell Proliferation and Cytokine Release Assessment of Exemplary Heteromultimers

[0481] The impact of incubating exemplary heteromultimers on cell proliferation and cytokine release was examined in PBMC and PBMC derived subpopulations. The PBMC derived subpopulations included PBMC, PBMC without B cells (PBMC-B), PBMC without NK cells (PBMC-NK), PBMC without NK and B cells (PBMC-NK-B), CD8+ T cells with B cells, and CD8+ without B cells. Briefly, Four (4) donors were tested for PBMC and PBMC derived subpopulations CD19-, CD56- or CD19/CD56-depleted PBMC populations) and two (2) donors were tested for CD8 and CD8 plus B cells during an incubation period of 4 and 6 days. The proliferation assay was performed with test items at 2 different concentrations (0.3 and 100 nM) each with thymidine incorporation as proliferation readout. The cytokines were measured using the CBA (Cytometric Bead Array) platform on a flow cytometer by the method described below.

[0482] A blood sample was collected from 6 normal donors (the CD8 counts of potential donors used in CD8 panel were determined previously), of whom two donors with high CD8 counts were selected for the CD8 experimental panel; one donor was also scheduled as back-up. On Day 1, about 135 mL of blood was collected from each of the 4 donors (for the PBMC panel), whereas on Day 2˜165 ml of blood was collected from each of the 2 donors (for the CD8 panel). On both days, PBMC were freshly isolated and the PMBC were passed through EasySep columns (STEMCELL Technologies Inc.) for CD19 and/or CD56 depletion by positive selection (day 1) and CD8 (±CD19) enrichment by negative selection (day 2).

[0483] To verify the composition/purity/viability of the selected subpopulations for both days, an antibody cocktail composed of CD8-FITC/CD56-PE/7AAD/CD19-PECY7/CD20-APC was employed.

[0484] The test items were prepared at 2× concentration for a final (after dilution with the cells) of 0.3 and 100 nM; were added in 100 ul of volume. The PBMCs were plated at 250,000 cells/well in 100 ul of suspension; the CD8 fractions were plated at 150,000 cells/well. The mixtures were incubated for 3 and 5 days respectively, after which 50 ul/well of cell supernatant was transferred into low binding plates and freeze for later cytokine analysis. 50 ul of tritiated thymidine was added to the cell containing wells for a final of 0.5 uCi thymidine/well; the plates were incubated for an additional 18 hours, after which the plates were frozen. Total incubation times were 4 and 6 days.

[0485] The plates were thawed two days later, filtered and counted (CPMs) using a β-counter.

[0486] The cell proliferation was assayed at 2 concentrations of test items (0.3 and 100 nM). From the averages, a Stimulation Index (SI) was calculated as follows and the data was tabulated: average CPM of test item/average CPM of media only

[0487] The composition/viability (trypan blue, 7AAD) of PBMCs and CD8-enriched cell populations were assessed for their respective proportions after selection using an antibody cocktail including anti: CD8/CD56/7AAD/CD20/CD56.

[0488] Once the proliferation results were analyzed, the supernatant from the replicates were pooled, excluding any identified outlier from the proliferation results. The pooled supernatant was used for cytokine measurements, in duplicates, using the CBA Human Th1/Th2 Cytokine Kit II from BD Biosciences. This kit measures IL-2, IL-4, IL-6, IL-10, TNF and IFg.

[0489] The results from the cell proliferation 4-day incubation assay are shown in FIG. 26 for the 0.3 nM (top panel) and the 100 nM (bottom panel) concentrations. The top panel of FIG. 26 shows that at 0.3 nM, v875 and v1380 do not induce PBMC proliferation compared to human IgG. The lower panel of FIG. 26 shows the results of the 100 nM antibody concentrations, and shows that v875, v1380 and v891 induce higher cell proliferation relative to human IgG. FIG. 26 (lower panel) also shows that at 100 nM, v875 has a similar proliferative index compared to anti-CD3 OKT3 in all four PBMC populations. However, compared to v875, v1380 (L234A_L235A Fc knock out variant) and v891 mediate a reduced cell proliferation and show a trend toward B cell dependence for cell proliferation, where the cell proliferation is lower in the PBMC-B and PBMC-B-NK subpopulations.

[0490] FIG. 28 show the results from the average stimulation index induced by v875 at 0.3

[0491] nM (FIG. 28A) and 100 nM (FIG. 28B) concentrations on purified CD8+ T cells in the absence or presence of purified CD19+ B cells at 4 days incubation time-point. FIG. 28A shows that at 0.3 nM, v875 has a higher stimulation index compared to human IgG and lower compared to OKT3. FIG. 28A also shows that v875 has a higher stimulation index of CD8+ T cells in the presence of target B cells (CD8+B). FIG. 28B shows that at 100 nM, v875 has a similar stimulation index compared to OKT3 and higher compared to human IgG with little to no influence of target B cell populations.

[0492] FIG. 29 shows the results from the average stimulation index induced by v1380 at 0.3nM (FIG. 29A) and 100nM (FIG. 29B) concentrations on purified CD8+ T cells in the absence or presence of purified CD19+ B cells at 4 days incubation time-point. FIG. 29A shows that at 0.3 nM, v1380 has a higher stimulation index compared to human IgG and lower compared to OKT3. FIG. 28A also shows that v1380 has a higher stimulation index of CD8+ T cells in the absence of target B cells (CD8). FIG. 29B shows that at 100 nM, v1380 has a similar stimulation index of CD8+ T cells compared to OKT3 and a higher stimulation index compared to human IgG. Similar to the 0.3 nM data, v1380 has a higher stimulation index of CD8+ T cells in the absence of target B cells (CD8). The L234A_L235A Fc knockout mutation in v1380 seems to reduced the B-cell dependent stimulation of CD8+ T cells that was apparent with the exemplary WT Fc variant v875.

[0493] The results from the cytokine release assay are shown in FIG. 27 and include summary plots of PBMC supernatant TNFα (FIG. 27A) INFγ (FIG. 27B), IL-2 (FIG. 27C), IL-4 (FIG. 27D), and IL-10 (FIG. 27E) levels following incubation with test items at 0.3 nM concentrations for 4 days (graph y-axis represents log cytokine levels in pg per mL from 4 donors). FIG. 27 shows that v1380 (L234A_L235A Fc knockout) induces less cytokine release of TNFα, INFγ, IL-2, IL-4, and IL-10 when compared to v875 (WT Fc) and OKT3.

### Example 22

### Exemplary Heteromultimers can Bridge Two or More Target B Cells Per Effector T Cell

[0494] The ability and ratio of numbers of T cell bridged to B cells was examined with the exemplary heteromultimer v875 by microscopy using the method described in Example 3 with the following modifications.

[0495] Labeled Raji B cells (red) and labeled Jurkat T cells (blue) were incubated for 30 min at RT with 3 nM of human IgG or v875. The cell suspension was concentrated by removing 180 μl of supernatant. Cell were resuspended in the remaining volume and imaged at 200× and 400×.

[0496] FIG. 30 shows the results from the T:B cell bridging microscopy comparing v875 and human IgG (3 nM) at 200× and 400× magnification; the phase image (top panel), fluorescence image (middle panel) and inverted fluorescence (bottom panel) are presented. FIG. 30A shows a direct comparison of human IgG and v875 at 200× magnification and illustrates a higher amount of bridging visible between Raji B cell and Jurkat T cells compared to human IgG. FIG. 30B and FIG. 30C show two fields of view for v875 (FIG. 30B) and human IgG (FIG. 30C) at 400× magnification. FIG. 30B shows images of v875-mediated immune complex formation between Jurkat T cells (dark grey cells in fluorescence inverted image) and Raji B cells (light grey cells in fluorescence inverted image), and that one Jurkat T cell can bridge 1-3 Raji B cells. FIG. 30C shows images following human IgG incubation with Jurkat T cells and Raji B cells. FIG. 30C shows an absence of the Jurkat-Raji bridging following incubation with human IgG, compared to the v875-mediated Jurkat:Raji bridging that is visible in FIG. 30B.

### Example 23

### Exemplary Heteromultimer Binding to Fcγ Receptors as Assessed by Surface Plasmon Resonance

[0497] The ability of the exemplary heteromultimeric antibodies to bind to FcγRs CD16a and CD32a/b was examined using Surface Plasmon Resonance (SPR).

[0498] Surface Plasmon Resonance Analysis: Affinity of FcγR receptors to antibody Fc was measured by SPR using a ProteOn XPR36 system from BIO-RAD. Purified anti-CD3/anti-CD19-based antibodies were indirectly captured when injected at 25□L/min for 240 s (resulting in approx. 500 RUs) following a buffer injection to establish a stable baseline.

[0499] FcγR concentrations (10,000, 3333, 1111, 370, 123nM) were injected at 604/min for 120 s with a 180 s dissociation phase to obtain a set of binding sensograms. Resultant K_{D} values were determined from binding isotherms were fit globally to a 1:1 Langmuir binding model with reported values as the mean of three independent runs.

[0500] The results of the SPR binding studies are shown in Table 4.

TABLE 4
KD for heterodimeric antibody binding to Fc gamma receptors

| | CD16aWT | | CD16aV158 | | CD32aWT | | CD32aR131 | | CD32bWT | | CD32bY163 | |
|---|---|---|---|---|---|---|---|---|---|---|---|---|
| | KD avg. | SD | KD avg. | SD | KD avg. | SD | KD avg. | SD | KD avg. | SD | KD avg. | SD |
| V875 | 1.0E−06 | 1.0E−07 | 3.6E−07 | 4E−08 | 5.9E−07 | 8E−08 | 6.0E−07 | 4E−08 | 4.3E−07 | 6E−08 | 1.3E−06 | 2E−07 |
| V1379 | 1.1E−06 | 4.1E−07 | 4.1E−07 | 4E−08 | 6.0E−07 | 1E−07 | 7.8E−07 | 8E−08 | 4.7E−07 | 6E−08 | 1.1E−06 | 2E−07 |
| V1380 | 5.0E−06 | 3.2E−06 | 3.2E−06 | 8E−07 | low | | NB | | NB | | low | |
| V1381 | NB | | NB | | NB | | NB | | NB | | NB | |
| WT herceptin | 2.4E−06 | 1.0E−07 | 8.6E−07 | 5E−08 | 1.2E−06 | 3E−07 | 1.6E−06 | 3E−07 | 9.9E−07 | 3E−08 | 2.9E−06 | 2E−07 |

[0501] Table 4 summarized the KD data for exemplary heteromultimer binding to CD16a, CD16aV158, CS32a, CD32aR131, CD32b and CD32bY163. These results show that WT Fc variants v875, v1379 and WT Herceptin bind to all Fc gamma receptors. These results also show that Fc knock out variants have impaired binding to some (v1380) or all (v1381) Fc gamma receptors.

### Example 24

### Exemplary Heteromultimers can Bind to the Human and Cynomologous CD3 T Cell Receptor

[0502] The binding of exemplary heteromultiers for binding to the human CD3 and cynomologous receptors was examined by ELISA by the following method.

[0503] Human or cynomologous CD3 receptor antigen was diluted at 20 μg/ml in PBS, in Costar 3690 high binding half area high binding microplate, incubated overnight at 4° C. Wells were washed 3 times with PBS and blocked with BSA 1% in PBS for 30 min (50 ul/well). Primary heteromultimeric antibodies were diluted in BSA 1% at the indicated concentrations and incubated for 2 hours at RT and wells washed 4 times with PBS-0.05% Tween 20. Secondary antibody (Jackson 115-036-062: anti-mouse or 709-036-098 anti-human Fcgamma specific) was diluted 1/5000 in BSA 1% (25 μl/well) and incubated for one hour at RT and washed 4 times with PBS-0.05% Tween 20. TMB substrate was added (25 μl/well) for 25-30 min., and the reactions was stopped with 1M H2SO4 (12.5 μl/well) and OD read at 450 nm.

[0504] The ELISA data is shown in FIG. 35 and illustrates binding to human CD3 (top panel) and binding to the cynomologous CD3 receptor (bottom panel) as determined by ELISA. FIG. 35 shows that v4543, v4545, and v4548 show that highest degree of cross-reactivity to the cynomologous CD3 receptor (FIG. 35 bottom panel).

### Example 25

### Expression and Purification of Heteromultimers

[0505] Description of the methods used in the expression and purification of exemplary heteromultimer are described in Example 2.

[0506] FIG. 31A shows the SDS-PAGE analysis and relative purity of v875, v1380, v1379 and v891 following protein A and SEC purification, and following 47 day storage at 4° C. The two visibile protein bands in the v891 sample indicate a breakdown product of this sample due to storage.

[0507] FIG. 31B shows the SDS-PAGE analysis and relative purity of additional exemplary hetermultimers including v875, v1653, v1654, v1655, v1656, v1660, v1800, and v1802 following protein A and SEC purification.

### Example 26

### Exemplary Heteromultimers can be Purified to >99% Heterodimer Purity and <1% Aggregates

[0508] The purity of exemplary heteromultimers was tested by LC-MS. The heteromultimers were first purifed by protein A, protein L and SEC purification as described in Example 2. LC-MS analysis for heterodimer purity was performed as described below.

[0509] The purified samples were de-glycosylated with PNGase F for 6 hr at 37° C. Prior to MS analysis the samples were injected onto a Poros R2 column and eluted in a gradient with 20-90% ACN, 0.1% FA in 3 minutes, resulting in one single peak.

[0510] The peak of the LC column was analyzed with a LTQ-Orbitrap XL mass spectrometer using the following setup: Cone Voltage: 50 V′ Tube lens: 215 V; FT Resolution: 7,500. The mass spectrum was integrated with the software Promass or Max Ent. to generate molecular weight profiles.

[0511] The LC-MS results of the Max Ent. molecular weight profiles for v875 are shown in FIG. 32 and the results summarized in Table 5.

TABLE 5
Heterodimer purity of v875

| | | SEC fraction | | Amount | Amount |
|---|---|---|---|---|---|
| Lot | Ratio | Index | Amount H1H1 | H1H2 | H2H2 |
| v875-229-A | 1:1 | N/A | 0.35 | 99.27 | 0.39 |

[0512] Table 5 shows that following protein A and SEC purification, v875 consistend of 99.27% heterodimer purity (H1H2) and less than 1% of the anti-CD3 homodimer (H2H2) and anti-CD19 homodimer (H1H1).

[0513] The purity and percent aggregation of exemplary protein A and SEC purified heteromultimers was determined by UPLC-SEC by the method described.

[0514] UPLC-SEC analysis was performed using a Waters BEH200 SEC column set to 30° C. (2.5 mL, 4.6×150 mm, stainless steel, 1.7 μm particles) at 0.4 ml/min. Run times consisted of 7 min and a total volume per injection of 2.8 mL with running buffers of 25 mM sodium phosphate, 150 mM sodium acetate, pH 7.1; and, 150 mM sodium phosphate, pH 6.4-7.1. Detection by absorbance was facilitated at190-400 nm and by fluorescence with excitation at 280 nm and emission collected from 300-360 nm. Peak integration was analyzed by Empower 3 software.

[0515] The LC-MS and UPLC-SEC results for exemplary heteromultimers is summarized in Table 6. Table 6 shows that all heteromultimers have a heterodimer purity >95% as determined by LC-MS, and all heteromultimers <2% aggregates as determined by UPLC-SEC analysis.

TABLE 6
Summary of LC-MS and UPLC-SEC analysis of exemplary heterodimers

| | | LCMS | | | | |
|---|---|---|---|---|---|---|
| | | % | % Lighter | % Heavier | % Lighter | % Heavier |
| Variant | UPLC | Heterodimer | Homodimer | Homodimer | Monomer | Monomer |
| v875 | NA | 99.27 | 0.35 | 0.39 | | |
| 1666 | 98.3 | 96.1 | 0 | 3.9# | 0 | 0 |
| 4541 | 99 | 97.4 | 1.1 | 1.5 | 0 | 0 |
| 4543 | 99.97 | 98.0* | 0 | 2 | 0 | 0 |
| 4545 | 99.94 | 96.6* | 0 | 3.4 | 0 | 0 |
| 4548 | 98.5 | 95.9 | 0 | 4.1# | 0 | 0 |
| v4549 | NA | 97 | 1.5 | 1.5 | 0 | 0 |

#Interference from an adjacent peak making exact quantification impossible.
True relative intensity % of this peak is likely less than presented value.
*by LC-MS after treatment with neuraminidase

### Example 27

### Exemplary Heteromultimers have a CH3 Tm that is Greater than 75° C.

[0516] CH3 domain stability of exemplary heteromultimers was examined by DSC using the following method. All DSC experiments were carried out using a GE VP-Capillary instrument. The proteins were buffer-exchanged into PBS (pH 7.4) and diluted to 0.3 to 0.7 mg/mL with 0.137 mL loaded into the sample cell and measured with a scan rate of 1° C./min from 20 to 100° C. Data was analyzed using the Origin software (GE Healthcare) with the PBS buffer background subtracted.

[0517] The DSC results shown in FIGS. 33 A, B and C show that v875 has an estimated CH3 Tm>76° C. (FIG. 33A), v1380 has an estimated CH3 Tm>82.3° C. (FIG. 33B), and v1379 has an estimated CH3 Tm>82.5° C. (FIG. 33C).

### Example 28

### Design, Expression and Purification of CD3/CD20 and Additional CD3/CD19 Heteromultimer Constructs

[0518] V5850 (corresponding to polypeptide sequences SEQ ID NOs: 203, 205 and 207), v5851 (corresponding to polypeptide sequences SEQ ID NOs: 209, 211 and 213), v5852 (corresponding to polypeptide sequences SEQ ID NOs: 215, 217 and 219), v6324 (corresponding to polypeptide sequences SEQ ID NOs: 221, 223 and 225), v6325 (corresponding to polypeptide sequences SEQ ID NOs: 225, 227 and 229), v1813 (corresponding to polypeptide sequences SEQ ID NOs: 231, 233 and 235), v1821 (corresponding to polypeptide sequences SEQ ID NOs: 237, 239 and 241), v1823 (corresponding to polypeptide sequences SEQ ID NOs: 243, 245 and 247) exemplify bispecific CD3/CD19 or CD3/CD20 hybrid heterodimeric Fc constructs. Bispecific hybrid variants are composed of a F(ab′) on either chain A or B paired with an scFv-Fc on the alternate polypeptide chain. Chain A of the heterdimer Fc is comprised of the following mutations: T350V_L351Y_F405A_Y407V and Chain B of the heterdimer Fc is comprised of the following mutations: T350V_T366L_K392L_T394W. v6324 exemplifies bispecific CD3/CD20 scFv heterodimeric Fc constructs. V1813, v1821, and v1823 exemplify CD3/CD20 common light chain heterodimeric Fc constructs. Common light chain variants are composed of two different F(ab′)s, each on complimentary heterodimer Fc, which share a single light chain. The specific variant composition is indicated in Table 7.

[0519] The anti-CD19 MOR208_scFv-Fc(VHVL) used in v5852 was generated by fusing the published variable heavy chain sequence to the variable light chain sequences indicated in table 7 with a (GGGGS)₃linker between the heavy and light chain. The variable domains were fused to Chain B of the heterdimer Fc.

[0520] The anti-CD20 Ofatumumab_scFv-Fc(VHVL) used in v6324 and v6325 was generated by fusing the published variable heavy chain sequence to the variable light chain sequences indicated in Table 7 with a (GGGGS)₃linker between the heavy and light chain. The variable domains were fused to Chain B of the heterdimer Fc.

[0521] Cloning, expression and purification was performed as indicated in Example 2.

[0522] Yield and purity of the variants is indicated in Table 8. Heterodimer purity was determined by LCMS analysis according to Example 26. All the variants demonstrated heterodimer purity in excess of 73.8% with an average purity of 89.6% for all variants tested. The samples had low amounts of incorrectly paired homodimers ranging from 0 to 5.3% of the total product. Reported values represent the sum of all observed homodimer species. The presence of half-antibodies was more commonly observed than homodimers and ranged from 0 to 20.7% of the total product. Reported values represent the sum of all observed half-antibody species

TABLE 7
Composition of CD3/CD19 or CD20 hybrid variants

| | v5850 | V5851 | V5852 | V6324 |
|---|---|---|---|---|
| Format | Hybrid | Hybrid | Hybrid | scFv-Fc |
| Chain A | aCD3- | aCD3- | aCD3- | aCD3- |
| | BiTEx_I2C_scFvFc | BiTEx_I2C_scFvFc | Teplizumab- | BiTEx_I2C_scFvFc |
| | (VHVL) | (VHVL) | hOKT3_Fab | (VHVL) |
| Chain B | aCD20- | aCD19- | aCD19- | aCD20- |
| | Ofatumumab_Fab | MOR208_Fab | MOR208_scFvFc_(VHVL) | Ofatumumab_Fab_scFvFc |
| | | | | (VHVL) |
| Light | aCD20- | aCD19- | aCD3- | N/A |
| Chain | Ofatumumab_Fab | MOR208_Fab | Teplizumab- | |
| | | | hOKT3 | |
| Reference | Chain A - | Chain A - | Chain A - | Chain A - |
| | US2011/0275787 | US2011/0275787 | US20070077246 | US2011/0275787 |
| | Chain B - | Chain B - | Chain B - | Chain B - |
| | WO2004035607 | WO2008022152 | Light | Light |
| | Light | Light Chain - | Chain - | Chain - |
| | Chain - | WO2008022152 | US20070077246 | na |
| | WO2004035607 | | | |

| | V6325 | v1813 | V1821 | V1823 |
|---|---|---|---|---|
| Format | Hybrid | Common | Common | Common |
| | | light chain | light chain | light chain |
| Chain A | aCD3- | aCD3- | aCD3- | aCD3- |
| | Teplizumab- | foralumab_Fab | 12F6_Fab | 12F6_Fab |
| | hOKT3_Fab | | | |
| Chain B | aCD20- | aCD20- | aCD20- | aCD20- |
| | Ofatumumab_scFvFc | Ofatumumab_Fab | Rituximab_Fab | Tositumumab_Fab |
| | VHVL) | | | |
| Light | aCD3- | aCD20- | aCD20- | aCD20- |
| Chain | Teplizumab- | Ofatumumab_Fab | Rituximab_Fab | Tositumumab_Fab |
| | hOKT3 | | | |
| Reference | Chain A - | Chain A - | Chain A - | Chain A - |
| | US20070077246 | WHO | Pubmed ID: | Pubmed |
| | Chain B - | drug | 16313362 | ID: |
| | Light Chain - | information | Chain B - | 16313362 |
| | US20070077246 | Vol. 24, | Drug bank | Chain B - |
| | | no2, 2010 | accession | Drug bank |
| | | Chain B - | number: | accession |
| | | WO2004035607 | DB00073 | number: |
| | | Light | Light Chain - | DB00081 |
| | | Chain - | Drug bank | Light Chain - |
| | | WO2004035607 | accession | Drug bank |
| | | | number: | accession |
| | | | DB00073 | number: |
| | | | | DB00081 |

TABLE 8
Variant expression and purity

| | V5850 | V5851 | V5852 | V6324* | V6325 | v1813 | V1821 | V1823 |
|---|---|---|---|---|---|---|---|---|
| Expression | 50 | 50 | 50 | 50 | 50 | 500 | 500 | 500 |
| scale (ml) | | | | | | | | |
| Amount after | 1.25 | 0.72 | 0.57 | 0.34 | 0.42 | 17.4 | 2.16 | 8.8 |
| SEC (mg) | | | | | | | | |
| % | 95.6 | 100 | 95.1 | 85 | 97.5 | 78.4 | 91.4 | 73.8 |
| Heterodimer | | | | | | | | |
| (AB) | | | | | | | | |
| % Homodimer | 0 | 0 | 4.9 | 0 | 0 | 1.36 | 3.7 | 5.3 |
| (AA + BB) | | | | | | | | |
| % half- | 4.4 | 0 | 0 | 5.5 | 2.5 | 20.2 | 4.8 | 20.7 |
| antibody | | | | | | | | |
| (A + B) | | | | | | | | |

*unknown species detected by LCMS resulted in lower purity estimates

### Example 29

### CD3/CD20 and Additional CD3/CD19 Heteromultimer Variants Bind to T Cells and B Cells

[0523] The ability of the exemplary CD3/CD20 heteromultimeters, v5850, v6324, v6325, v1813, v1821, v1823 to bind to CD3 and CD20 cells were assessed via FACS analysis as per procedures described in Example 4. Additionally, the ability of an exemplary CD3/CD19 heteromultimers, v5851 and v5852 to bind to CD3 and CD19 cells were similarily assessed. An additional variant v875, a CD3/CD19 BiTE Fc antibody construct, were also prepared and tested as benchmarks. Representative binding curves for v875, v5850 and v5851 on Raji and Jurkat cells are shown in FIG. 36A & 38B. The binding results for each variant expressed in kinetic constants Bmax and Kd are listed below in Tables 9 and 10. Table 8 describes the binding to the CD19 and CD20-expressing Raji B cells, while Table 10 describes binding to the CD3-expresssing Jurkat T cells. In Raji binding studies (Table 9) all the variants bound with a greater Bmax and a higher Kd compared to 875. In Jurkat binding studies (Table 10) all the variants, except v1823, bound with a higher Bmax than 875 and had a range of KD's.

TABLE 9
(Raji)

| | v875 | v4542 | v5850 | v5851 | v5852 | v6324 | v6325 | v1813 | v1821 | v1823 |
|---|---|---|---|---|---|---|---|---|---|---|
| Bmax | 2.78 | 2.96 | 4.24 | 3.88 | na | 6.91 | 6.44 | 6.40 | 4.71 | 4.14 |
| (OD450) | | | | | | | | | | |
| KD | 0.36 | 0.70 | 3.60 | 1.38 | na | 25.35 | 11.87 | 4.04 | 122.5 | 21.05 |
| (nM) | | | | | | | | | | |

TABLE 10
(Jurkat)

| | v875 | v4542 | v5850 | v5851 | v5852 | v6324 | v6325 | v1813 | v1821 | v1823 |
|---|---|---|---|---|---|---|---|---|---|---|
| Bmax | 1.59 | 2.27 | 2.06 | 2.51 | 2.21 | 2.32 | 2.51 | 2.54 | 2.11 | 0.88 |
| (OD450) | | | | | | | | | | |
| KD | 21.36 | 6.66 | 4.04 | 4.24 | 25.24 | 11.62 | 1.58 | 691.4 | 181.5 | 68.77 |
| (nM) | | | | | | | | | | |

### Example 30

### CD3/CD20 and Additional CD3/CD19 Heteromultimer Variants Bridge T Cells and B Cells

[0524] The ability of the six exemplary CD3/CD20 heteromultimer variants—namely v5850, v6324, v6325, v1813, v1821 and v1823—and two exemplary CD3/CD19 heteromultimer variants—namely v5851 and v5852—to bridge T cells and B cells were tested via FACS analysis as per procedures described in Example 3. Additional constructs, namely v792 and v875, were also prepared and tested as controls. V792 has identical anti-Her2 F(ab′) based on trastuzumab on chain A and chain B of the heterodimer Fc with the following mutations T350V_L351Y_F405A_Y407V on chain A and T350V_T366L_K392L_T394W on chain B (drug bank accession number—DB00072)

[0525] Table 11 and 12 provides the percentage bridging between Jurkat-Jurkat, Raji-Raji, and Jurkat-Raji for each variant, each table represents an individual experiment. All variants were effective at bridging Jurkat and Raji cells. Furthermore, none of the variants bridged two jurkat cells and some Raji-Raji cell bridging was observed to different extents.

TABLE 11

| | Bridging | | | | | | |
|---|---|---|---|---|---|---|---|
| | 792 | 875 | 5850 | 5851 | 1813 | 1821 | 1823 |
| urkat/Jurkat | .5 | .6 | .8 | .0 | .6 | .5 | .7 |
| aji/Raji | .6 | 0.2 | .1 | .6 | .0 | .4 | .1 |
| urkat/Raji | .6 | 7.0 | 1.6 | 3.2 | 6.2 | .3 | .1 |

TABLE 12

| | % Bridging | | | | |
|---|---|---|---|---|---|
| | 792 | 875 | 5852 | 6324 | 6325 |
| Jurkat/Jurkat | .7 | .5 | .9 | .8 | .1 |
| Raji/Raji | .7 | .6 | .2 | .5 | .7 |
| Jurkat/Raji | .9 | 5.7 | 0.4 | .7 | 5.7 |

### Example 31

### Design, Expression and Purification of HER2/HER3 Heteromultimeric Constructs

[0526] To assess various properties of HER2/HER3 bispecific heteromultimeric constructs, two formats and various controls were produced and purified as follows. The first construct was produced by fusing HER2- and HER3-binding scFvs onto a heterodimer Fc region (v878, HER2/HER3 Het-Fc). The second construct was prepared by fusion of Her2 and Her3 scFvs onto an albumin-based platform (v1090, AlbuCORE anti-Her3×Her2). Various controls, including a Her2 One-Armed het-Fc, a Her3 one-armed het-Fc and the control HSA-fusion protein v1087 were also produced as controls.

[0527] Design

[0528] The bispecific HER2/HER3 constructs were produced by fusion of Her2 and Her3 scFvs onto the het-Fc or the AlbuCORE platforms.

[0529] 1. Variant 878: a monovalent one-armed anti-Her2 antibody, where the Her2 binding domain is a scFv on chain A, and the Fc region is a heterodimer having the mutations L351Y_F405A_Y407V in Chain A, and T366L_K392M_T394W in Chain B. The epitope of antigen binding domain is domain 1 of Her2.

[0530] 2. Variant 879: a monovalent one-armed anti-Her3 antibody, where the Her3 binding domain is a scFv on chain B, and the Fc region is a heterodimer having the mutations L351Y_F405A_Y407V in Chain A, and T366L_K392M_T394W in Chain B.

[0531] 3. Variant 880: a bispecific anti-Her2, anti-Her3 antibody, where the Her2 binding domain is a scFv on chain A, the Her3 binding domain is a scFv on chain B and the Fc region is a heterodimer having the mutations L351Y_F405A_Y407V in Chain A, and T366L_K392M_T394W in Chain B.

[0532] 4. Variant 1087: The MM-111 molecule is a single polypeptide fusion protein of two scFvs, anti-Her2 (B1D2) and anti-Her3 (H3), linked to the C and N termini, respectively, of a modified human serum albumin protein, and is produced by Merrimack. The resulting molecule is bispecific and bivalent. As a control, a version of the MM-111 molecule was constructed in which the anti-Her3 (H3) warhead was fused to the N terminus of albumin by a short AAS linker, while anti-Her2 (B1D2) was fused to the C terminus through an AAAL linker to create the benchmark control variant 1087. This control variant lacks the C34S/N504Q mutation originally introduced by Merrimack in their MM-111 molecule, and has a polypeptide sequence corresponding to SEQ ID NO:258.

[0533] 5. Variant 1090: An albumin-based heteromultimer was formed by combining fragment 1 fused to antiHER3 at its N terminus through a GGGS linker [SEQ ID NO:260] and fragment 2 fused to antiHER2 (B1 D2) at its C terminus through a GGGS linker [SEQ ID NO:262] (variant number 1090). This molecule has warheads or cargo polypeptides in cis and is almost identical to v1087. The main differences between the 1087 polypeptide and the 1090 are that 1) the linkers used in the 1087 polypeptide were more hydrophobic, while the linkers used on the 1090 variant were polyGLY)(S) and 2) The 1090 variant lacks the C34S/N504Q mutation originally introduced by Merrimack.

[0534] Variants 878, 879, and 880 were expressed and purified as described in Example 2. Variants 1087 and 1090 were expressed and purified as described in Example 10.

### Example 32

### Fc-Based HER2/HER3 Heteromultimeric Constructs Bind Bispecifically to Her2 and Her3 Receptors on MALME-3M Cells

[0535] The ability of the v878, v879 and v880 HER2 and HER3 constructs to bind to Her2 and Her3 was assessed using FACS analysis:

[0536] A dose range of the two one-arm monovalent variants (anti-HER2 one-arm, v878, and anti-HER2 one-arm, v879) and the bispecific anti-HER2/HER3 heterodimer, v880, was inclubated with MALME-3M melanoma cells followed by FACS analysis to determine the binding affinity of each molecule as described in Example 4.

[0537] FIG. 37A and 37B illustrates affinity on linear and log scales respectively. As the figures show, the HER2/HER3 het-Fc construct demonstrates both bi-specificity and avidity.

### Example 33

### Albumin-Based HER2/HER3 Based Constructs to Bind Bispecifically to Her2 and Her3 Receptors on MALME-3 Cells

[0538] The binding affinity of an albumin-based heteromultimer loaded in a cis configuration with anti-Her2 and anti-Her3 scFvs to MALME-3M cells were assessed and compared to the v1087 control.

[0539] The binding affinity of an exemplary albumin-based heteromultimer variant 1090 (anti-Her2×anti-Her3 ABH2) for MALME-3M cells was evaluated using FACS with FITC-labeled anti-HSA antibodies, as described in Example 4.

[0540] FIG. 38 depicts the binding of variant 1090 compared to the control 1087 in MALME-3M cells and indicates that v1090 has similar binding as v1087 to target MALME-3M cells.

### Example 34

### Monovalent One-Armed Anti-CD3 Antibodies are Able to Bridge Jurkat T Cells and Raji B Cells

[0541] The ability of monospecific anti-CD3 antibodies v870, v871, v872 to bridge T cells and B cells was tested by FACS analysis as described in Example 3.

[0542] The results are summarized in Table 13 and show that v870, v871 and v872 bridge a higher percentage of Jurkat T and Raji B cells when compared to medium and human IgG controls. Table 13 also shows that v870, v871 and v872 bridge a lower percentage of Jurkat T and Raji B cells when compared to the bispecific anti-CD3 anti-CD19 antibody, v873.

TABLE 13
Monovalent anti-CD3 antibody bridging of Jurkat T and Raji B cells

| | | Jurkat/Raji |
|---|---|---|
| Variant | Description | (%) |
| Medium | | 7.0 |
| v870 | OAA_anti-CD3 (VH-VL_BiTE) | 9.0 |
| v871 | OAA_anti-CD3 (VL-VH_BiTE) | 15.4 |
| v872 | OAA_anti-CD3 (VL-VH_OKT3) | 14.0 |
| v873 | bispecific CD19-CD3(VH-VL-BiTE) | 27.6 |
| Human IgG | | 6 |
| Medium | | 7.3 |

[0543] It is understood that the examples and embodiments described herein are for illustrative purposes only and that various modifications or changes in light thereof will be suggested to persons skilled in the art and are to be included within the spirit and purview of this application and scope of the appended claims.

1. An isolated multispecific heteromultimer construct comprising:
a first polypeptide construct comprising a first heavy chain polypeptide and a CD3 binding polypeptide construct that binds to a CD3 complex on at least one CD3 expressing cell;
a second polypeptide construct comprising a second heavy chain polypeptide which is different from said first heavy chain polypeptide, and an antigen binding polypeptide construct that binds to a target antigen on at least one B cell; wherein:
at least one of said CD3 binding polypeptide construct and said antigen binding polypeptide construct comprises a single chain Fv region;
said multispecific heteromultimer construct simultaneously engages said at least one B cell and said at least one CD3 expressing cell such that the CD3 expressing cell is activated, thereby inducing killing of the B cell; and
said first and second heavy chain polypeptides form a heterodimeric Fc region comprising a variant immunoglobulin CH3 region comprising at least one amino acid mutation that promotes the formation of said heterodimeric Fc, wherein:
said heterodimeric Fc is formed with stability at least comparable to a native homodimeric Fc, and
said heterodimeric Fc is formed with purity such that when said multispecific heteromultimer construct is expressed in a mammalian cell in an expression product, said expression product comprises at least about 70% of said multispecific heteromultimer, and less than 10% monomers or homodimers of said first or second polypeptide constructs.

2. The isolated multispecific heteromultimer of claim 1, wherein said first or second polypeptide construct is devoid of at least one of immunoglobulin light chain, and immunoglobulin first constant (CH1) region.

3. The isolated multispecific heteromultimer of claim 1, wherein the heterodimer Fc region comprises a variant CH2 domain or hinge comprising amino acid modifications that prevents functionally effective binding to all the Fcgamma receptors, and/or to complement proteins (C1q complex).

4. (canceled)

5. The isolated multispecific heteromultimer of claim 1, wherein the heterodimer Fc region comprises a variant CH2 domain or hinge comprising amino acid modifications that enhance binding to the FcγRIIb receptor.

6. An isolated multispecific heteromultimer construct comprising:
a first polypeptide construct comprising a first heavy chain polypeptide and a CD3 binding polypeptide construct that binds to a CD3 complex on at least one CD3 expressing cell;
a second polypeptide construct comprising a second heavy chain polypeptide which is different from said first heavy chain polypeptide, and an antigen binding polypeptide construct that binds to a target antigen on at least one B cell; wherein:
at least one of said CD3 binding polypeptide construct and said antigen binding polypeptide construct optionally comprises a single chain Fv region;
said first and second heavy chain polypeptides form a heterodimeric Fc region comprising a variant immunoglobulin CH3 region comprising at least one amino acid mutation that promotes the formation of said heterodimeric Fc, wherein:
said heterodimeric Fc is formed with stability at least comparable to a native homodimeric Fc, and
said heterodimeric Fc is formed with purity such that when said multispecific heteromultimer construct is coexpressed from a mammalian cell in an expression product, said expression product comprises greater than 70% of said multispecific heteromultimer, and less than 10% monomers or homodimers of said first or second polypeptide constructs; and
said multispecific heteromultimer construct binds said at least one B cell with a valency greater than one, and said multispecific heteromultimer simultaneously engages said at least one B cell and said at least one CD3 expressing cell such that the CD3 expressing cell is activated, thereby inducing killing of the B cell.

7. (canceled)

8. (canceled)

9. The isolated multispecific heteromultimer of claim 1 wherein the heterodimer Fc region comprises a variant CH2 domain comprising amino acid modifications to promote selective binding of a Fcgamma receptor.

10. (canceled)

11. (canceled)

12. The isolated multispecific heteromultimer according to claim 1, wherein the variant CH3 domain has a melting temperature (Tm) of about 73° C. or greater.

13. (canceled)

14. (canceled)

15. The isolated multispecific heteromultimer according to claim 1, wherein the heterodimer Fc region is formed with a purity of at least about 90% and/or the Tm is about 75° C.

16. The isolated multispecific heteromultimer according to claim 1 wherein:
a. the variant CH3 sequence of the first heavy chain polypeptide comprises the amino acid modifications L351Y, F405A, and Y407V, and the variant CH3 sequence of the second transporter polypeptide comprises the amino acid modifications T366L, K392M, and T394W;
b. the variant CH3 sequence of the first heavy chain polypeptide comprises the amino acid modifications L351Y, F405A, and Y407V, and the variant CH3 sequence of the second heavy chain polypeptide comprises the amino acid modifications T366L, K392L, and T394W;
c. the variant CH3 sequence of the first heavy chain polypeptide comprises the amino acid modifications T350V, L351Y, F405A, and Y407V, and the variant CH3 sequence of the second heavy chain polypeptide comprises the amino acid modifications T350V, T366L, K392M, and T394W;
d. the variant CH3 sequence of the first heavy chain polypeptide comprises the amino acid modifications T350V, L351Y, F405A, and Y407V, and the variant CH3 sequence of the second heavy chain polypeptide comprises the amino acid modifications T350V, T366L, K392L, and T394W;
e. the variant CH3 sequence of the first heavy chain polypeptide comprises the amino acid modifications T366L, N390R, K392R, and T394W, and the variant CH3 sequence of the second heavy chain polypeptide comprises the amino acid modifications L351Y, S400E, F405A, and Y407V; or
f. the variant CH3 sequence of the first heavy chain polypeptide comprises the amino acid modifications T350V, T366L, N390R, K392R, and T394W, and the variant CH3 sequence of the second heavy chain polypeptide comprises the amino acid modifications T350V, L351Y, S400E, F405A, and Y407V.

17. The isolated multispecific heteromultimer of claim 1 wherein the heterodimer Fc is glycosylated, afucosylated, and/or aglycosylated.

18. (canceled)

19. (canceled)

20. The isolated multispecific heteromultimer of claim 1, wherein said antigen binding polypeptide construct that binds to a target antigen on at least one B cell comprises at least one target antigen binding domain derived from an antibody, a fibronectin, an affibody, anticalin, cysteine knot protein, DARPin, avimer, Kunitz domain or variant or derivative thereof.

21. The isolated multispecific heteromultimer of claim 20, wherein said antibody is a heavy chain antibody devoid of light chains.

22. The isolated multispecific heteromultimer of claim 1, wherein said antigen binding polypeptide construct comprises at least one CD19 binding domain or at least one CD20 binding domain.

23.-34. (canceled)

35. The isolated multispecific heteromultimer of claim 1, wherein said at least one CD3 binding polypeptide construct comprises at least one CD3 binding domain derived from a CD3 specific antibody, a nanobody, fibronectin, affibody, anticalin, cysteine knot protein, DARPin, avimer, Kunitz domain or variant or derivative thereof.

36. The isolated multispecific heteromultimer of claim 35, wherein said at least one CD3 binding domain comprises at least one amino acid modification that reduces immunogenicity as compared to a corresponding CD3 binding domain not comprising said modification, or at least one amino acid modification that increases its stability as measured by Tₘ, as compared to a corresponding CD3 binding domain not comprising said modification.

37. (canceled)

38. The isolated multispecific heteromultimer of claim 36, wherein said CD3 specific antibody is a heavy chain antibody devoid of light chains.

39. (canceled)

40. The isolated multispecific heteromultimer of claim 1 wherein both of said first and second polypeptide constructs comprise a single-chain Fv polypeptide.

41. The isolated multispecific heteromultimer of claim 1 wherein at least one of said first and second polypeptide constructs further comprises a single-chain Fab polypeptide.

42. The isolated multispecific heteromultimer of claim 1 wherein the CD3 expressing cell is a T-cell, and wherein said heteromultimer binds to the T-cell with sufficient affinity and decorates the T cell at sufficient capacity that induces the T-cell to display B cell killing activity when the T cell and the B cell are bridged.

43. (canceled)

44. The isolated multispecific heteromultimer of claim 1 where in the CD3 expressing cell is a human cell, or a non-human, mammalian cell.

45. (canceled)

46. The isolated multispecific heteromultimer of claim 1 where in the at least one CD3 binding polypeptide construct binds to CD3 constructs across multiple species.

47. The isolated multispecific heteromultimer of claim 1 wherein the at least one B cell is associated with a cancer, or is an autoimmune reactive cell that is a lymphoid or myeloid cell.

48. The isolated multispecific heteromultimer of claim 47 wherein the disease is a cancer selected from a carcinoma, a sarcoma, leukaemia, lymphoma and glioma.

49.-51. (canceled)

52. The isolated multispecific heteromultimer of claim 1 wherein said heteromultimer optionally comprises a linker between the CD3 binding polypeptide construct and said heterodimeric Fc and/or between the antigen binding polypeptide construct and said heterodimeric Fc.

53. The isolated multispecific heteromultimer of claim 52, wherein said at least one linker is a polypeptide comprising from about 1 to about 100 amino acids.

54. A set of expression vectors for expressing the multispecific heteromultimer claim 1, comprising at least a first DNA sequence encoding said first polypeptide construct and at least a second DNA sequence encoding said second polypeptide construct.

55. A method of producing an expression product containing a multispecific heteromultimer of claim 1, in stable mammalian cells, the method comprising:
transfecting at least one mammalian cell with: at least a first DNA sequence encoding said first polypeptide construct and at least a second DNA sequence encoding said second polypeptide construct, such that said at least one first DNA sequence, said at least one second DNA sequence are transfected in said at least one mammalian cell in a pre-determined ratio to generate stable mammalian cells; culturing said stable mammalian cells to produce said expression product comprising said multispecific heteromultimer.

56.-57. (canceled)

58. A pharmaceutical composition comprising the multispecific heteromultimer of claim 1, and a suitable excipient.

59. A process for the production of a pharmaceutical composition of claim 57, said process comprising:
culturing a host cell under conditions allowing the expression of a heteromultimer of claim 1;
recovering the produced heteromultimer from the culture; and
producing the pharmaceutical composition.

60. (canceled)

61. A method of treating cancer in a mammal in need thereof, comprising administering to the mammal a composition comprising an effective amount of the heteromultimer of claim 1, optionally in combination with other pharmaceutically active molecules.

62.-67. (canceled)

68. A method of treating a cancer non-responsive to at least one of a CD19 lytic antibody, a CD20 lytic antibody and blinatumomab, in a mammal in need thereof, comprising administering to the mammal a composition comprising an effective amount of the heteromultimer of claim 1.

69.-71. (canceled)

72. A method of treating an autoimmune condition or an inflammatory condition in a mammal in need thereof, comprising administering to said mammal a composition comprising an effective amount of the heteromultimer of claim 1.

73.-74. (canceled)

75. A kit comprising a heteromultimer of claim 1, and instructions for use thereof.

The application's sequence listing, which the Patent Office published only in electronic form, follows.

SEQUENCE LISTING (282 sequences)

SEQ ID NO: 1 - DNA, 1548 bp, Artificial Sequence
  Description of Artificial Sequence: Synthetic polynucleotide
gaattcgccaccatggccgtgatggcacctcgaacactggtcctgctgctgagcggggcactggcactgacacagacttgggctggagacattcagctgacacagagtcctgcttcactggcagtgagcctgggacagcgagcaactatctcctgcaaagctagtcagtcagtggactatgatggcgactcctatctgaactggtaccagcagatcccagggcagccccctaagctgctgatctacgacgcctcaaatctggtgagcggcatcccaccacgattcagcggcagcggctctgggactgattttaccctgaacattcacccagtcgagaaggtggacgccgctacctaccattgccagcagtctaccgaggacccctggacattcggcgggggaactaaactggaaatcaagggaggaggaggcagtggcggaggagggtcaggaggaggaggaagccaggtgcagctgcagcagagcggagcagagctggtcagaccaggaagctccgtgaaaatttcctgtaaggcatctggctatgccttttctagttactggatgaattgggtgaagcagaggccaggacagggcctggaatggatcgggcagatttggcccggggatggagacactaactataatggaaagttcaaaggcaaggctacactgactgcagacgagtcaagctccaccgcatatatgcagctgtctagtctggccagcgaggattccgctgtctacttttgcgcacggagagaaaccacaactgtgggcaggtactattacgccatggactactggggccaggggaccacagtcaccgtgtcaagcgcagccgaacccaaatcctctgataagacccacacatgccctccatgtccagctcctgagctgctgggaggaccaagcgtgttcctgtttccacctaaacctaaggacaccctgatgatctctcggacacccgaagtcacttgtgtggtcgtggatgtgagccacgaggaccctgaagtcaaattcaactggtacgtggatggcgtcgaggtgcataatgccaaaacaaagcctagggaggaacagtataactccacttaccgcgtcgtgtctgtcctgaccgtgctgcatcaggactggctgaacggaaaggagtacaaatgcaaggtgagcaacaaggccctgccagctcccatcgagaagaccatttccaaagctaagggccagcctcgagaaccacaggtgtatacactgccacccagccgggacgagctgaccaaaaaccaggtctccctgacatgtctggtgaagggattctacccttctgatattgcagtggagtgggaaagtaatggccagccagaaaacaattataagactacccctccagtcctggattctgacgggagtttctttctgtacagtaaactgacagtggataagtcacggtggcagcagggaaacgtctttagttgttcagtgatgcacgaggccctgcacaatcattacactcagaaaagcctgtccctgtctcccggcaagtgaggatcc

SEQ ID NO: 2 - protein, 513 aa, Artificial Sequence
  Description of Artificial Sequence: Synthetic polypeptide
EFATMAVMAPRTLVLLLSGALALTQTWAGDIQLTQSPASLAVSLGQRATISCKASQSVDYDGDSYLNWYQQIPGQPPKLLIYDASNLVSGIPPRFSGSGSGTDFTLNIHPVEKVDAATYHCQQSTEDPWTFGGGTKLEIKGGGGSGGGGSGGGGSQVQLQQSGAELVRPGSSVKISCKASGYAFSSYWMNWVKQRPGQGLEWIGQIWPGDGDTNYNGKFKGKATLTADESSSTAYMQLSSLASEDSAVYFCARRETTTVGRYYYAMDYWGQGTTVTVSSAAEPKSSDKTHTCPPCPAPELLGGPSVFLFPPKPKDTLMISRTPEVTCVVVDVSHEDPEVKFNWYVDGVEVHNAKTKPREEQYNSTYRVVSVLTVLHQDWLNGKEYKCKVSNKALPAPIEKTISKAKGQPREPQVYTLPPSRDELTKNQVSLTCLVKGFYPSDIAVEWESNGQPENNYKTTPPVLDSDGSFFLYSKLTVDKSRWQQGNVFSCSVMHEALHNHYTQKSLSLSPGK

SEQ ID NO: 3 - DNA, 1527 bp, Artificial Sequence
  Description of Artificial Sequence: Synthetic polynucleotide
gaattcgccaccatggctgtgatggctcctagaaccctggtcctgctgctgtccggggcactggcactgactcagacttgggccggggatatcaaactgcagcagagcggagctgagctggcacgaccaggagccagtgtgaaaatgtcatgcaagacaagcggctacaccttcacacggtatactatgcactgggtgaaacagagacccggccaggggctggaatggatcggatatattaacccttcccgaggctacaccaactataatcagaagtttaaagacaaggccaccctgaccacagataagagctcctctacagcttacatgcagctgagttcactgactagtgaggactcagctgtgtactattgcgcaaggtactatgacgatcattactgtctggattattggggacagggcactaccctgacagtcagctccgtggaaggagggagcggaggctccggaggatctggcgggagtggaggcgtggacgatatccagctgactcagtccccagcaattatgtccgcctctcccggcgagaaagtcactatgacctgccgcgcttctagttcagtgagctacatgaactggtatcagcagaaatcaggcaccagccccaagagatggatctacgacacatccaaggtcgcatctggggtgccttataggttcagtgggtcaggaagcggcacttcctactctctgaccattagctccatggaggcagaagatgccgctacctactattgtcagcagtggtctagtaatccactgacatttggggccggaactaaactggagctgaaggcagccgaacccaaatcaagcgacaagacacacacttgccccccttgtccagcacccgaactgctggggggacctagcgtgttcctgtttccacccaaaccaaaggatacactgatgatcagccggacccctgaggtcacatgcgtggtcgtggacgtgagccacgaggaccccgaagtcaagttcaactggtacgtggacggcgtcgaagtgcataatgctaaaaccaagcctagggaggaacagtacaatagtacttatcgcgtcgtgtcagtcctgaccgtgctgcatcaggattggctgaacgggaaggagtacaaatgcaaggtgtccaacaaggccctgcctgctccaatcgagaagactatttctaaagccaagggccagccccgagaacctcaggtgtataccctgcctccatcccgggacgagctgaccaaaaaccaggtctctctgacatgtctggtgaaggggttctacccatctgatattgctgtggagtgggaaagtaatggacagcccgagaacaattataagacaactccccctgtcctggactccgatggatctttctttctgtacagcaaactgacagtggacaagtccagatggcagcagggcaacgtctttagttgttcagtgatgcacgaggccctgcacaatcattacacccagaaaagcctgtccctgtctcccggcaagtgaggatcc

SEQ ID NO: 4 - protein, 506 aa, Artificial Sequence
  Description of Artificial Sequence: Synthetic polypeptide
EFATMAVMAPRTLVLLLSGALALTQTWAGDIKLQQSGAELARPGASVKMSCKTSGYTFTRYTMHWVKQRPGQGLEWIGYINPSRGYTNYNQKFKDKATLTTDKSSSTAYMQLSSLTSEDSAVYYCARYYDDHYCLDYWGQGTTLTVSSVEGGSGGSGGSGGSGGVDDIQLTQSPAIMSASPGEKVTMTCRASSSVSYMNWYQQKSGTSPKRWIYDTSKVASGVPYRFSGSGSGTSYSLTISSMEAEDAATYYCQQWSSNPLTFGAGTKLELKAAEPKSSDKTHTCPPCPAPELLGGPSVFLFPPKPKDTLMISRTPEVTCVVVDVSHEDPEVKFNWYVDGVEVHNAKTKPREEQYNSTYRVVSVLTVLHQDWLNGKEYKCKVSNKALPAPIEKTISKAKGQPREPQVYTLPPSRDELTKNQVSLTCLVKGFYPSDIAVEWESNGQPENNYKTTPPVLDSDGSFFLYSKLTVDKSRWQQGNVFSCSVMHEALHNHYTQKSLSLSPGK

SEQ ID NO: 5 - DNA, 1518 bp, Artificial Sequence
  Description of Artificial Sequence: Synthetic polynucleotide
gaattcgccaccatggctgtgatggctccacgcaccctggtcctgctgctgtccggggcactggcactgactcagacttgggctggggatattcagctgacccagtctccagcaatcatgtccgcctctcccggcgagaaagtcaccatgacatgccgggctagctcctctgtgtcctacatgaactggtatcagcagaaaagtggaacatcacccaagagatggatctacgacacttcaaaggtcgcaagcggcgtgccttataggttcagtggatcaggcagcgggacttcctactctctgaccattagttcaatggaggcagaagatgccgctacctactattgccagcagtggagctccaatccactgacatttggagccggcactaaactggaactgaagggcggaggaggctcaggaggaggagggagcggcggaggaggcagcgacatcaagctgcagcagagcggagctgagctggcacgaccaggagcctccgtgaaaatgtcttgtaagaccagtggctacactttcacccggtatacaatgcactgggtgaagcagagacccgggcagggactggaatggatcgggtatattaaccctagccgaggatacacaaactacaaccagaagtttaaagacaaggccactctgaccaccgataagtctagttcaaccgcttacatgcagctgagctccctgacaagcgaggactccgctgtgtactattgcgcaaggtactatgacgatcactactgtctggattattggggccaggggactaccctgaccgtgtctagtgcagccgaacctaaatcaagcgacaagacacatacttgccccccttgtccagcaccagagctgctgggaggaccttccgtgttcctgtttccacccaaaccaaaggatacactgatgatctctcgcacccctgaagtcacatgcgtggtcgtggacgtgagccacgaggaccccgaagtcaagttcaactggtacgtggacggcgtcgaggtgcataatgctaaaaccaagcccagggaggaacagtacaattctacttatcgcgtcgtgagtgtcctgaccgtgctgcaccaggattggctgaacggcaaggagtacaaatgcaaggtgagcaacaaggccctgcctgctccaatcgagaagactatttccaaagccaaggggcagccccgagaacctcaggtgtataccctgcctccaagtcgggacgagctgaccaaaaaccaggtctccctgacatgtctggtgaagggcttctacccatccgatattgctgtggagtgggaatctaatgggcagcccgaaaacaattataagacaactccccctgtcctggactctgatgggagtttctttctgtactcaaaactgacagtggataagagcagatggcagcagggaaacgtctttagttgttcagtgatgcatgaggccctgcacaatcattacactcagaaaagcctgtccctgtctcccggcaagtgaggatcc

SEQ ID NO: 6 - protein, 502 aa, Artificial Sequence
  Description of Artificial Sequence: Synthetic polypeptide
EFATMAVMAPRTLVLLLSGALALTQTWAGDIQLTQSPAIMSASPGEKVTMTCRASSSVSYMNWYQQKSGTSPKRWIYDTSKVASGVPYRFSGSGSGTSYSLTISSMEAEDAATYYCQQWSSNPLTFGAGTKLELKGGGGSGGGGSGGGGSDIKLQQSGAELARPGASVKMSCKTSGYTFTRYTMHWVKQRPGQGLEWIGYINPSRGYTNYNQKFKDKATLTTDKSSSTAYMQLSSLTSEDSAVYYCARYYDDHYCLDYWGQGTTLTVSSAAEPKSSDKTHTCPPCPAPELLGGPSVFLFPPKPKDTLMISRTPEVTCVVVDVSHEDPEVKFNWYVDGVEVHNAKTKPREEQYNSTYRVVSVLTVLHQDWLNGKEYKCKVSNKALPAPIEKTISKAKGQPREPQVYTLPPSRDELTKNQVSLTCLVKGFYPSDIAVEWESNGQPENNYKTTPPVLDSDGSFFLYSKLTVDKSRWQQNVFSCSVMHEALHNHYTQKSLSLSPGK

SEQ ID NO: 7 - DNA, 1518 bp, Artificial Sequence
  Description of Artificial Sequence: Synthetic polynucleotide
gaattcgccaccatggctgtgatggctccaagaacactggtcctgctgctgtccggggcactggcactgactcagacatgggccgggcagattgtcctgacacagagcccagcaatcatgtcagccagccccggcgagaaagtcaccatgacatgctcagcaagctcctctgtgagctacatgaactggtatcagcagaaaagcggaacatcccccaagagatggatctacgacacttccaagctggcttctggagtgcctgcacacttcaggggcagcggctctgggactagttattcactgaccatttccggcatggaggctgaagatgccgctacctactattgccagcagtggagttcaaacccattcacatttggatctggcactaagctggaaattaatggcggaggaggctccggaggaggagggtctggaggaggaggaagtcaggtccagctgcagcagtccggagctgagctggcacgaccaggagcaagtgtgaaaatgtcctgtaaggccagcggctacactttcacccggtatactatgcattgggtgaaacagagacccgggcagggactggaatggatcgggtacattaatcctagccgaggatacaccaactacaaccagaagtttaaagacaaggctaccctgaccacagataagagctcctctacagcatatatgcagctgagttcactgacttctgaggacagtgccgtgtactattgcgctaggtactatgacgatcactactgtctggattattggggccaggggactaccctgaccgtgagctccgcagccgaacctaaatctagtgacaagacacatacttgcccaccttgtccagcaccagagctgctgggaggaccttccgtgttcctgtttccacccaaaccaaaggatacactgatgatctcccggacccctgaagtcacatgcgtggtcgtggacgtgtctcacgaggaccccgaagtcaagtttaactggtacgtggacggcgtcgaggtgcataatgccaaaaccaagcccagggaggaacagtacaactccacttatcgcgtcgtgtctgtcctgaccgtgctgcaccaggattggctgaacggcaaggagtacaaatgcaaggtgagcaacaaggccctgcctgctccaatcgagaagaccattagcaaagccaaggggcagccccgagaacctcaggtgtacacactgcctccatctcgggacgagctgaccaaaaaccaggtcagtctgacatgtctggtgaagggcttctatccaagcgatattgctgtggagtgggaatccaatgggcagcccgaaaacaattacaagacaactccccctgtcctggactcagatgggagcttctttctgtatagtaaactgacagtggacaagtcacggtggcagcagggaaacgtctttagctgttccgtgatgcatgaggccctgcacaatcattacactcagaaatctctgagtctgtcacccggcaagtgaggatcc

SEQ ID NO: 8 - protein, 503 aa, Artificial Sequence
  Description of Artificial Sequence: Synthetic polypeptide
EFATMAVMAPRTLVLLLSGALALTQTWAGQIVLTQSPAIMSASPGEKVTMTCSASSSVSYMNWYQQKSGTSPKRWIYDTSKLASGVPAHFRGSGSGTSYSLTISGMEAEDAATYYCQQWSSNPFTFGSGTKLEINGGGGSGGGGSGGGGSQVQLQQSGAELARPGASVKMSCKASGYTFTRYTMHWVKQRPGQGLEWIGYINPSRGYTNYNQKFKDKATLTTDKSSSTAYMQLSSLTSEDSAVYYCARYYDDHYCLDYWGQGTTLTVSSAAEPKSSDKTHTCPPCPAPELLGGPSVFLFPPKPKDTLMISRTPEVTCVVVDVSHEDPEVKFNWYVDGVEVHNAKTKPREEQYNSTYRVVSVLTVLHQDWLNGKEYKCKVSNKALPAPIEKTISKAKGQPREPQVYTLPPSRDELTKNQVSLTCLVKGFYPSDIAVEWESNGQPENNYKTTPPVLDSDGSFFLYSKLTVDKSRWQQGNVFSCSVMHEALHNHYTQKSLSLSPGK

SEQ ID NO: 9 - DNA, 1548 bp, Artificial Sequence
  Description of Artificial Sequence: Synthetic polynucleotide
gaattcgccaccatggccgtgatggcacctagaacactggtcctgctgctgagcggagccctggcactgacacagacttgggccggagacattcagctgacacagagtcctgcttcactggcagtgagcctgggacagcgagcaactatctcctgcaaagctagtcagtcagtggactatgatggcgactcctatctgaactggtaccagcagatcccagggcagccccctaagctgctgatctacgacgcctcaaatctggtgagcggcatcccaccacgattcagcggcagcggctctgggactgattttaccctgaacattcacccagtcgagaaggtggacgccgctacctaccattgccagcagtctaccgaggacccctggacattcggcgggggaactaaactggaaatcaagggaggaggaggcagtggcggaggagggtcaggaggaggaggaagccaggtgcagctgcagcagagcggagcagagctggtcagaccaggaagctccgtgaaaatttcctgtaaggcatctggctatgccttttctagttactggatgaattgggtgaagcagaggccaggacagggcctggaatggatcgggcagatttggcccggggatggagacactaactataatggaaagttcaaaggcaaggctacactgactgcagacgagtcaagctccaccgcttatatgcagctgtctagtctggccagcgaggattccgctgtctacttttgcgcacggagagaaaccacaactgtgggcaggtactattacgcaatggactactggggccaggggaccacagtcaccgtgtcaagcgcagccgaacccaaatcctctgataagacccacacatgccctccatgtccagcacctgagctgctgggaggaccaagcgtgttcctgtttccacctaaacctaaggacaccctgatgatctctcggacacccgaagtcacttgtgtggtcgtggatgtgagccacgaggaccctgaagtcaaattcaactggtacgtggatggcgtcgaggtgcataatgccaaaacaaagcctagggaggaacagtataactccacttaccgcgtcgtgtctgtcctgaccgtgctgcatcaggactggctgaacggaaaggagtacaaatgcaaggtgagcaacaaggccctgccagctcccatcgagaagaccatttccaaagctaagggccagcctcgagaaccacaggtgtatacatacccacccagccgggacgagctgaccaaaaaccaggtctccctgacatgtctggtgaagggattttatccttctgatattgccgtggagtgggaaagtaatggccagccagaaaacaattacaagactacccctccagtgctggattctgacgggagtttcgcactggtcagtaaactgacagtggataagtcacggtggcagcagggaaacgtctttagttgttcagtgatgcacgaggccctgcacaatcattacactcagaaaagcctgtccctgtctcccggcaagtgaggatcc

SEQ ID NO: 10 - protein, 513 aa, Artificial Sequence
  Description of Artificial Sequence: Synthetic polypeptide
EFATMAVMAPRTLVLLLSGALALTQTWAGDIQLTQSPASLAVSLGQRATISCKASQSVDYDGDSYLNWYQQIPGQPPKLLIYDASNLVSGIPPRFSGSGSGTDFTLNIHPVEKVDAATYHCQQSTEDPWTFGGGTKLEIKGGGGSGGGGSGGGGSQVQLQQSGAELVRPGSSVKISCKASGYAFSSYWMNWVKQRPGQGLEWIGQIWPGDGDTNYNGKFKGKATLTADESSSTAYMQLSSLASEDSAVYFCARRETTTVGRYYYAMDYWGQGTTVTVSSAAEPKSSDKTHTCPPCPAPELLGGPSVFLFPPKPKDTLMISRTPEVTCVVVDVSHEDPEVKFNWYVDGVEVHNAKTKPREEQYNSTYRVVSVLTVLHQDWLNGKEYKCKVSNKALPAPIEKTISKAKGQPREPQVYTYPPSRDELTKNQVSLTCLVKGFYPSDIAVEWESNGQPENNYKTTPPVLDSDGSFALVSKLTVDKSRWQQGNVFSCSVMHEALHNHYTQKSLSLSPGK

SEQ ID NO: 11 - DNA, 792 bp, Artificial Sequence
  Description of Artificial Sequence: Synthetic polynucleotide
gaattcgctacaatggccgtgatggcaccccgaacactggtcctgctgctgagcggcgcactggcactgacacagacttgggctggagaacctaagagctccgacaaaacccacacatgccccccttgtccagctccagaactgctgggaggaccatccgtgttcctgtttccacccaagcccaaagatacactgatgatctctcgaactcccgaggtcacctgcgtggtcgtggacgtcagtcacgaggaccccgaagtcaagttcaactggtacgtggacggcgtcgaagtgcataatgcaaagactaaaccacgggaggaacagtacaactcaacatatagagtcgtgagcgtcctgactgtgctgcatcaggattggctgaacggcaaggagtataagtgcaaagtgagcaataaggccctgcctgctccaatcgagaaaaccattagcaaggcaaaagggcagcccagggaacctcaggtgtacaccctgcctccaagccgcgacgagctgacaaagaaccaggtctccctgctgtgtctggtgaaaggattctatcctagtgatattgccgtggagtgggaatcaaatggccagccagagaacaattacatgacttggccccctgtgctggactctgatgggagtttctttctgtattccaagctgaccgtggacaaatctagatggcagcagggaaacgtcttttcttgtagtgtgatgcacgaagccctgcacaatcattacacacagaagtcactgagcctgtcccctggcaaatgaggatcc

SEQ ID NO: 12 - protein, 261 aa, Artificial Sequence
  Description of Artificial Sequence: Synthetic polypeptide
EFATMAVMAPRTLVLLLSGALALTQTWAGEPKSSDKTHTCPPCPAPELLGGPSVFLFPPKPKDTLMISRTPEVTCVVVDVSHEDPEVKFNWYVDGVEVHNAKTKPREEQYNSTYRVVSVLTVLHQDWLNGKEYKCKVSNKALPAPIEKTISKAKGQPREPQVYTLPPSRDELTKNQVSLLCLVKGFYPSDIAVEWESNGQPENNYMTWPPVLDSDGSFFLYSKLTVDKSRWQQGNVFSCSVMHEALHNHYTQKSLSLSPGK

SEQ ID NO: 13 - DNA, 792 bp, Artificial Sequence
  Description of Artificial Sequence: Synthetic polynucleotide
gaattcgccaccatggccgtgatggctcctagaaccctggtcctgctgctgagcggggcactggcactgacacagacttgggctggggaacctaaatctagcgacaagactcacacctgcccaccttgtccagcaccagaactgctgggaggaccaagcgtgttcctgtttccacccaagcccaaagatactctgatgatcagccgaacacccgaggtcacttgcgtggtcgtggacgtgtcccacgaggaccccgaagtcaagttcaactggtacgtggacggcgtcgaagtgcataatgctaagacaaaaccacgggaggaacagtacaactctacttatagagtcgtgagtgtcctgaccgtgctgcatcaggattggctgaacggcaaagagtataagtgcaaagtgtctaataaggccctgcctgctccaatcgagaaaacaattagtaaggctaaagggcagcccagggaacctcaggtgtacacttatcctccaagtcgcgacgagctgaccaagaaccaggtctcactgacatgtctggtgaaaggattttacccttccgatattgcagtggagtgggaatctaatggccagccagagaacaattataagaccacaccccctgtgctggacagcgatgggtccttcgcactggtctcaaagctgaccgtggacaaaagcagatggcagcagggaaacgtctttagctgttccgtgatgcacgaagccctgcacaatcattacacacagaagtctctgagtctgtcacctggcaaatgaggatcc

SEQ ID NO: 14 - protein, 261 aa, Artificial Sequence
  Description of Artificial Sequence: Synthetic polypeptide
EFATMAVMAPRTLVLLLSGALALTQTWAGEPKSSDKTHTCPPCPAPELLGGPSVFLFPPKPKDTLMISRTPEVTCVVVDVSHEDPEVKFNWYVDGVEVHNAKTKPREEQYNSTYRVVSVLTVLHQDWLNGKEYKCKVSNKALPAPIEKTISKAKGQPREPQVYTYPPSRDELTKNQVSLTCLVKGFYPSDIAVEWESNGQPENNYKTTPPVLDSDGSFALVSKLTVDKSRWQQGNVFSCSVMHEALHNHYTQKSLSLSPGK

SEQ ID NO: 15 - DNA, 1527 bp, Artificial Sequence
  Description of Artificial Sequence: Synthetic polynucleotide
gaattcgccaccatggctgtgatggcacctagaaccctggtcctgctgctgagcggggcactggcactgacacagacatgggccggagatattaagctgcagcagagcggagctgagctggcacgaccaggagccagtgtgaaaatgtcatgcaagaccagcggctacacattcactcggtatacaatgcactgggtgaagcagagaccaggacagggactggaatggatcggatatattaacccttcccgaggctacaccaactataatcagaagtttaaagacaaggccactctgaccacagataagagctcctctaccgcttacatgcagctgagttcactgacaagtgaggactcagctgtgtactattgcgcaaggtactatgacgatcattactgtctggattattggggacagggcactaccctgactgtcagctccgtggaaggagggagcggaggctccggaggatctggcgggagtggaggcgtggacgatatccagctgacccagtccccagcaattatgtccgcctctcccggcgagaaagtcaccatgacatgccgcgcttctagttcagtgagctacatgaactggtatcagcagaaatcaggcactagccccaagagatggatctacgacacctccaaggtcgcatctggggtgccttataggttcagtgggtcaggaagcggcacctcctactctctgacaattagctccatggaggcagaagatgccgctacctactattgtcagcagtggtctagtaatccactgacttttggggccggaaccaaactggagctgaaggcagccgaacccaaatcaagcgacaagactcacacctgccccccttgtccagcacccgaactgctggggggacctagcgtgttcctgtttccacccaaaccaaaggatacactgatgatcagccggacacctgaggtcacttgcgtggtcgtggacgtgagccacgaggaccccgaagtcaagttcaactggtacgtggacggcgtcgaagtgcataatgctaaaactaagcctagggaggaacagtacaatagtacatatagagtcgtgtcagtgctgaccgtcctgcatcaggattggctgaacgggaaggagtacaaatgcaaggtgtccaacaaggccctgcctgctccaatcgagaagacaatttctaaagccaagggccagccccgagaacctcaggtgtatacactgcctccatcccgggacgagctgactaaaaaccaggtctctctgctgtgtctggtgaaggggttctacccatctgatattgctgtggagtgggaaagtaatggacagcccgagaacaattatatgacctggccccctgtcctggactccgatggatctttctttctgtacagcaaactgacagtggacaagtccagatggcagcagggcaacgtctttagttgttcagtgatgcacgaggccctgcacaatcattacacccagaaaagcctgtccctgtctcccggcaagtgaggatcc

SEQ ID NO: 16 - protein, 506 aa, Artificial Sequence
  Description of Artificial Sequence: Synthetic polypeptide
EFATMAVMAPRTLVLLLSGALALTQTWAGDIKLQQSGAELARPGASVKMSCKTSGYTFTRYTMHWVKQRPGQGLEWIGYINPSRGYTNYNQKFKDKATLTTDKSSSTAYMQLSSLTSEDSAVYYCARYYDDHYCLDYWGQGTTLTVSSVEGGSGGSGGSGGSGGVDDIQLTQSPAIMSASPGEKVTMTCRASSSVSYMNWYQQKSGTSPKRWIYDTSKVASGVPYRFSGSGSGTSYSLTISSMEAEDAATYYCQQWSSNPLTFGAGTKLELKAAEPKSSDKTHTCPPCPAPELLGGPSVFLFPPKPKDTLMISRTPEVTCVVVDVSHEDPEVKFNWYVDGVEVHNAKTKPREEQYNSTYRVVSVLTVLHQDWLNGKEYKCKVSNKALPAPIEKTISKAKGQPREPQVYTLPPSRDELTKNQVSLLCLVKGFYPSDIAVEWESNGQPENNYMTWPPVLDSDGSFFLYSKLTVDKSRWQQGNVFSCSVMHEALHNHYTQKSLSLSPGK

SEQ ID NO: 17 - DNA, 792 bp, Artificial Sequence; identical to SEQ ID NO: 13
  Description of Artificial Sequence: Synthetic polynucleotide

SEQ ID NO: 18 - protein, 260 aa, Artificial Sequence
  Description of Artificial Sequence: Synthetic polypeptide
EFATMAVMAPRTLVLLLSGALALTQTWAGEPKSSDKTHTCPPCPAPELLGGPSVFLFPPKPKDTLMISRTPEVCVVVDVSHEDPEVKFNWYVDGVEVHNAKTKPREEQYNSTYRVVSVLTVLHQDWLNGKEYKCKVSNKALPAPIEKTISKAKGQPREPQVYTYPPSRDELTKNQVSLTCLVKGFYPSDIAVEWESNGQPENNYKTTPPVLDSDGSFALVSKLTVDKSRWQQGNVFSCSVMHEALHNHYTQKSLSLSPGK

SEQ ID NO: 19 - DNA, 1518 bp, Artificial Sequence
  Description of Artificial Sequence: Synthetic polynucleotide
gaattcgccaccatggccgtgatggcacctagaaccctggtcctgctgctgagcggggcactggcactgacacagacttgggctggagacattcagctgacacagtctccagcaatcatgtccgcctctcccggcgagaaagtcacaatgacttgccgggctagctcctctgtgtcctacatgaactggtatcagcagaaaagtggaacctcacccaagagatggatctacgacacatcaaaggtcgcaagcggcgtgccttataggttcagtggatcaggcagcgggacctcctactctctgacaattagttcaatggaggcagaagatgccgctacctactattgccagcagtggagctccaatccactgacttttggagccggcaccaaactggaactgaagggcggaggaggctcaggaggaggagggagcggcggaggaggcagcgacatcaagctgcagcagagcggagctgagctggcacgaccaggagcctccgtgaaaatgtcttgtaagactagtggctacaccttcacacggtataccatgcactgggtgaagcagagacccgggcagggactggaatggatcgggtatattaaccctagccgaggatacacaaactacaaccagaagtttaaagacaaggccacactgaccaccgataagtctagttcaactgcttacatgcagctgagctccctgaccagcgaggactccgctgtgtactattgcgcaaggtactatgacgatcactactgtctggattattggggccaggggactaccctgactgtgtctagtgcagccgaacctaaatcaagcgacaagactcatacctgcccaccttgtccagcaccagagctgctgggaggaccttccgtgttcctgtttccacccaaaccaaaggatactctgatgatctctcgcacacctgaagtcacttgcgtggtcgtggacgtgagccacgaggaccccgaagtcaagttcaactggtacgtggacggcgtcgaggtgcataatgctaaaaccaagcccagggaggaacagtacaattctacatatcgcgtcgtgagtgtcctgactgtgctgcaccaggattggctgaacggcaaggagtacaaatgcaaggtgagcaacaaggccctgcctgctccaatcgagaagaccatttccaaagccaaggggcagccccgagaacctcaggtgtatacactgcctccaagtcgggacgagctgactaaaaaccaggtctccctgctgtgtctggtgaagggcttctacccatccgatattgctgtggagtgggaatctaatgggcagcccgaaaacaattatatgacctggccccctgtcctggactctgatgggagtttctttctgtactcaaaactgacagtggataagagcagatggcagcagggaaacgtctttagttgttcagtgatgcatgaggccctgcacaatcattacacccagaaaagcctgtccctgtctcccggcaagtgaggatcc

SEQ ID NO: 20 - protein, 503 aa, Artificial Sequence
  Description of Artificial Sequence: Synthetic polypeptide
EFATMAVMAPRTLVLLLSGALALTQTWAGDIQLTQSPAIMSASPGEKVTMTCRASSSVSYMNWYQQKSGTSPKRWIYDTSKVASGVPYRFSGSGSGTSYSLTISSMEAEDAATYYCQQWSSNPLTFGAGTKLELKGGGGSGGGGSGGGGSDIKLQQSGAELARPGASVKMSCKTSGYTFTRYTMHWVKQRPGQGLEWIGYINPSRGYTNYNQKFKDKATLTTDKSSSTAYMQLSSLTSEDSAVYYCARYYDDHYCLDYWGQGTTLTVSSAAEPKSSDKTHTCPPCPAPELLGGPSVFLFPPKPKDTLMISRTPEVTCVVVDVSHEDPEVKFNWYVDGVEVHNAKTKPREEQYNSTYRVVSVLTVLHQDWLNGKEYKCKVSNKALPAPIEKTISKAKGQPREPQVYTLPPSRDELTKNQVSLLCLVKGFYPSDIAVEWESNGQPENNYMTWPPVLDSDGSFFLYSKLTVDKSRWQQGNVFSCSVMHEALHNHYTQKSLSLSPGK

SEQ ID NO: 21 - DNA, 792 bp, Artificial Sequence; identical to SEQ ID NO: 13
  Description of Artificial Sequence: Synthetic polynucleotide

SEQ ID NO: 22 - protein, 261 aa, Artificial Sequence; identical to SEQ ID NO: 14
  Description of Artificial Sequence: Synthetic polypeptide

SEQ ID NO: 23 - DNA, 1518 bp, Artificial Sequence
  Description of Artificial Sequence: Synthetic polynucleotide
gaattcgccaccatggccgtgatggctccaagaacactggtcctgctgctgagcggggcactggcactgacacagacatgggctgggcagatcgtcctgacacagagcccagcaatcatgtcagccagccccggcgagaaagtcacaatgacttgctcagcaagctcctctgtgagctacatgaactggtatcagcagaaaagcggaacctcccccaagagatggatctacgacacatccaagctggcttctggagtgcctgcacacttcaggggcagcggctctgggaccagttattcactgacaatttccggcatggaggctgaagatgccgctacctactattgccagcagtggagttcaaacccattcacttttggatctggcaccaagctggaaattaatggcggaggaggctccggaggaggagggtctggaggaggaggaagtcaggtccagctgcagcagtccggagctgagctggcacgaccaggagcaagtgtgaaaatgtcctgtaaggccagcggctacaccttcacacggtataccatgcattgggtgaaacagagacccgggcagggactggaatggatcgggtacattaatcctagccgaggatacacaaactacaaccagaagtttaaagacaaggctactctgaccacagataagagctcctctaccgcatatatgcagctgagttcactgacatctgaggacagtgccgtgtactattgcgctaggtactatgacgatcactactgtctggattattggggccaggggactaccctgaccgtgagctccgcagccgaacctaaatctagtgacaagactcatacctgccccccttgtccagcaccagagctgctgggaggaccttccgtgttcctgtttccacccaaaccaaaggatactctgatgatctcccggacacctgaagtcacttgcgtggtcgtggacgtgtctcacgaggaccccgaagtcaagtttaactggtacgtggacggcgtcgaggtgcataatgccaaaaccaagcccagggaggaacagtacaactccacatatcgcgtcgtgtctgtcctgactgtgctgcaccaggattggctgaacggcaaggagtacaaatgcaaggtgagcaacaaggccctgcctgctccaatcgagaagacaattagcaaagccaaggggcagccccgagaacctcaggtgtacactctgcctccatctcgggacgagctgaccaaaaaccaggtcagtctgctgtgtctggtgaagggcttctatccaagcgatattgctgtggagtgggaatccaatgggcagcccgaaaacaattacatgacatggccccctgtcctggactcagatgggagcttctttctgtatagtaaactgactgtggacaagtcacggtggcagcagggaaacgtctttagctgttccgtgatgcatgaggccctgcacaatcattacacccagaaatctctgagtctgtcacccggcaagtgaggatcc

SEQ ID NO: 24 - protein, 503 aa, Artificial Sequence
  Description of Artificial Sequence: Synthetic polypeptide
EFATMAVMAPRTLVLLLSGALALTQTWAGQIVLTQSPAIMSASPGEKVTMTCSASSSVSYMNWYQQKSGTSPKRWIYDTSKLASGVPAHFRGSGSGTSYSLTISGMEAEDAATYYCQQWSSNPFTFGSGTKLEINGGGGSGGGGSGGGGSQVQLQQSGAELARPGASVKMSCKASGYTFTRYTMHWVKQRPGQGLEWIGYINPSRGYTNYNQKFKDKATLTTDKSSSTAYMQLSSLTSEDSAVYYCARYYDDHYCLDYWGQGTTLTVSSAAEPKSSDKTHTCPPCPAPELLGGPSVFLFPPKPKDTLMISRTPEVTCVVVDVSHEDPEVKFNWYVDGVEVHNAKTKPREEQYNSTYRVVSVLTVLHQDWLNGKEYKCKVSNKALPAPIEKTISKAKGQPREPQVYTLPPSRDELTKNQVSLLCLVKGFYPSDIAVEWESNGQPENNYMTWPPVLDSDGSFFLYSKLTVDKSRWQQGNVFSCSVMHEALHNHYTQKSLSLSPGK

SEQ ID NO: 25 - DNA, 1548 bp, Artificial Sequence; identical to SEQ ID NO: 9
  Description of Artificial Sequence: Synthetic polynucleotide

SEQ ID NO: 26 - protein, 513 aa, Artificial Sequence; identical to SEQ ID NO: 10
  Description of Artificial Sequence: Synthetic polypeptide

SEQ ID NO: 27 - DNA, 1527 bp, Artificial Sequence; identical to SEQ ID NO: 15
  Description of Artificial Sequence: Synthetic polynucleotide

SEQ ID NO: 28 - protein, 506 aa, Artificial Sequence; identical to SEQ ID NO: 16
  Description of Artificial Sequence: Synthetic polypeptide

SEQ ID NO: 29 - DNA, 1548 bp, Artificial Sequence; identical to SEQ ID NO: 9
  Description of Artificial Sequence: Synthetic polynucleotide

SEQ ID NO: 30 - protein, 513 aa, Artificial Sequence; identical to SEQ ID NO: 10
  Description of Artificial Sequence: Synthetic polypeptide

SEQ ID NO: 31 - DNA, 1518 bp, Artificial Sequence; identical to SEQ ID NO: 19
  Description of Artificial Sequence: Synthetic polynucleotide

SEQ ID NO: 32 - protein, 503 aa, Artificial Sequence; identical to SEQ ID NO: 20
  Description of Artificial Sequence: Synthetic polypeptide

SEQ ID NO: 33 - DNA, 1548 bp, Artificial Sequence; identical to SEQ ID NO: 9
  Description of Artificial Sequence: Synthetic polynucleotide

SEQ ID NO: 34 - protein, 513 aa, Artificial Sequence; identical to SEQ ID NO: 10
  Description of Artificial Sequence: Synthetic polypeptide

SEQ ID NO: 35 - DNA, 1518 bp, Artificial Sequence; identical to SEQ ID NO: 23
  Description of Artificial Sequence: Synthetic polynucleotide

SEQ ID NO: 36 - protein, 503 aa, Artificial Sequence; identical to SEQ ID NO: 24
  Description of Artificial Sequence: Synthetic polypeptide

SEQ ID NO: 37 - DNA, 1548 bp, Artificial Sequence
  Description of Artificial Sequence: Synthetic polynucleotide
gaattcgccaccatggccgtgatggcaccccgcaccctggtcctgctgctgtccggggcactggcactgactcagacttgggctggcgatattcagctgacacagagtcctgcatcactggctgtgagcctgggacagcgagcaactatctcctgcaaagccagtcagtcagtggactatgatggcgactcctatctgaactggtaccagcagatcccagggcagccccctaagctgctgatctacgacgcctcaaatctggtgagcggcatcccaccacgattcagcggcagcggctctgggactgattttaccctgaacattcacccagtcgagaaggtggacgccgctacctaccattgccagcagtctaccgaggacccctggacattcggcgggggaactaaactggaaatcaagggaggaggaggcagtggcggaggagggtcaggaggaggaggaagccaggtgcagctgcagcagagcggagcagagctggtcagaccaggaagctccgtgaaaatttcctgtaaggcttctggctatgcattttctagttactggatgaattgggtgaagcagaggccaggacagggcctggaatggatcgggcagatttggcccggggatggagacaccaactataatggaaagttcaaaggcaaggccacactgactgctgacgagtcaagctccacagcctatatgcagctgtctagtctggcaagcgaggattccgccgtgtacttttgcgctcggagagaaaccacaactgtgggcaggtactattacgctatggactactggggccaggggaccacagtcaccgtgtcaagcgcagccgaacccaaatcctctgataagacccacacatgccctccatgtccagctcctgaggctgcaggaggaccaagcgtgttcctgtttccccctaaacctaaggacacactgatgatctctcggacacccgaagtcacttgtgtggtcgtgagcgtgagccacgaggaccctgaagtcaaattcaactggtacgtggatggcgtcgaggtgcataatgccaaaactaagcctagggaggaacagtataactccacttaccgcgtcgtgtctgtcctgaccgtgctgcatcaggactggctgaacggaaaggagtacaaatgcaaggtgagcaacaaggcactgccagcccccatcgagaagacaatttccaaagcaaagggccagcctcgagaaccacaggtctatgtgtacccacccagccgggacgagctgaccaaaaaccaggtctccctgacatgtctggtgaagggattttatccttctgatattgccgtggagtgggaaagtaatggccagccagaaaacaattacaagactacccctccagtgctggattctgacgggagtttcgctctggtcagtaaactgactgtggataagtcacggtggcagcagggaaacgtctttagttgttcagtgatgcacgaggcactgcacaatcattacacccagaaaagcctgtccctgtctcccggcaagtgaggatcc

SEQ ID NO: 38 - protein, 513 aa, Artificial Sequence
  Description of Artificial Sequence: Synthetic polypeptide
EFATMAVMAPRTLVLLLSGALALTQTWAGDIQLTQSPASLAVSLGQRATISCKASQSVDYDGDSYLNWYQQIPGQPPKLLIYDASNLVSGIPPRFSGSGSGTDFTLNIHPVEKVDAATYHCQQSTEDPWTFGGGTKLEIKGGGGSGGGGSGGGGSQVQLQQSGAELVRPGSSVKISCKASGYAFSSYWMNWVKQRPGQGLEWIGQIWPGDGDTNYNGKFKGKATLTADESSSTAYMQLSSLASEDSAVYFCARRETTTVGRYYYAMDYWGQGTTVTVSSAAEPKSSDKTHTCPPCPAPEAAGGPSVFLFPPKPKDTLMISRTPEVTCVVVSVSHEDPEVKFNWYVDGVEVHNAKTKPREEQYNSTYRVVSVLTVLHQDWLNGKEYKCKVSNKALPAPIEKTISKAKGQPREPQVYVYPPSRDELTKNQVSLTCLVKGFYPSDIAVEWESNGQPENNYKTTPPVLDSDGSFALVSKLTVDKSRWQQGNVFSCSVMHEALHNHYTQKSLSLSPGK

SEQ ID NO: 39 - DNA, 1518 bp, Artificial Sequence
  Description of Artificial Sequence: Synthetic polynucleotide
gaattcgccaccatggccgtgatggcacctcgcaccctggtcctgctgctgagcggggcactggcactgacacagacttgggccggacagatcgtcctgacacagagcccagctatcatgtcagcaagccccggcgagaaagtcacaatgacttgctcagccagctcctctgtgagctacatgaactggtatcagcagaaaagcggaacctcccccaagagatggatctacgacacatccaagctggcctctggagtgcctgctcacttcaggggcagcggctctgggaccagttattcactgacaatttccggcatggaggccgaagatgccgctacctactattgccagcagtggagttcaaacccattcacttttggatctggcaccaagctggaaattaatggcggaggaggctccggaggaggagggtctggaggaggaggaagtcaggtgcagctgcagcagtccggagcagagctggctcgaccaggagctagtgtgaaaatgtcctgtaaggcaagcggctacaccttcacacggtataccatgcattgggtgaaacagagacccgggcagggactggaatggatcgggtacattaatcctagccgaggatacacaaactacaaccagaagtttaaagacaaggccactctgaccacagataagagctcctctaccgcttatatgcagctgagttcactgacatctgaggacagtgcagtgtactattgcgccaggtactatgacgatcactactgtctggattattggggccaggggactaccctgacagtgagctccgcagccgaacctaaatctagtgacaagactcatacctgccccccttgtccagcaccagaggctgcaggaggaccttccgtgttcctgtttccacccaaaccaaaggatactctgatgatctcccggacacctgaagtcacttgcgtggtcgtgagcgtgtctcacgaggaccccgaagtcaagtttaactggtacgtggacggcgtcgaggtgcataatgccaaaaccaagcccagggaggaacagtacaactccacatatcgcgtcgtgtctgtcctgactgtgctgcaccaggattggctgaacggcaaggagtacaaatgcaaggtgagcaacaaggcactgcctgccccaatcgagaagacaattagcaaagcaaaggggcagccccgagaacctcaggtctacgtgctgcctccatctcgggacgagctgactaaaaaccaggtcagtctgctgtgtctggtgaagggcttctatccaagcgatattgctgtggagtgggaatccaatgggcagcccgaaaacaattacctgacttggccccctgtcctggactcagatgggagcttctttctgtatagtaaactgaccgtggacaagtcacggtggcagcagggaaacgtctttagctgttccgtgatgcatgaggccctgcacaatcattacacccagaaatctctgagtctgtcacccggcaagtgaggatcc

SEQ ID NO: 40 - protein, 503 aa, Artificial Sequence
  Description of Artificial Sequence: Synthetic polypeptide
EFATMAVMAPRTLVLLLSGALALTQTWAGQIVLTQSPAIMSASPGEKVTMTCSASSSVSYMNWYQQKSGTSPKRWIYDTSKLASGVPAHFRGSGSGTSYSLTISGMEAEDAATYYCQQWSSNPFTFGSGTKLEINGGGGSGGGGSGGGGSQVQLQQSGAELARPGASVKMSCKASGYTFTRYTMHWVKQRPGQGLEWIGYINPSRGYTNYNQKFKDKATLTTDKSSSTAYMQLSSLTSEDSAVYYCARYYDDHYCLDYWGQGTTLTVSSAAEPKSSDKTHTCPPCPAPEAAGGPSVFLFPPKPKDTLMISRTPEVTCVVVSVSHEDPEVKFNWYVDGVEVHNAKTKPREEQYNSTYRVVSVLTVLHQDWLNGKEYKCKVSNKALPAPIEKTISKAKGQPREPQVYVLPPSRDELTKNQVSLLCLVKGFYPSDIAVEWESNGQPENNYLTWPPVLDSDGSFFLYSKLTVDKSRWQQGNVFSCSVMHEALHNHYTQKSLSLSPGK

SEQ ID NO: 41 - DNA, 1548 bp, Artificial Sequence; identical to SEQ ID NO: 37
  Description of Artificial Sequence: Synthetic polynucleotide

SEQ ID NO: 42 - protein, 513 aa, Artificial Sequence; identical to SEQ ID NO: 38
  Description of Artificial Sequence: Synthetic polypeptide

SEQ ID NO: 43 - DNA, 1518 bp, Artificial Sequence
  Description of Artificial Sequence: Synthetic polynucleotide
gaattcgccaccatggccgtgatggcacctcgcaccctggtcctgctgctgagcggggcactggcactgacacagacttgggctgggcagatcgtcctgacacagagcccagctatcatgtcagcaagccccggcgagaaagtcacaatgacttgctcagccagctcctctgtgagctacatgaactggtatcagcagaaaagcggaacctcccccaagagatggatctacgacacatccaagctggcctctggagtgcctgctcacttcaggggcagcggctctgggaccagttattcactgacaatttccggcatggaggccgaagatgccgctacctactattgccagcagtggagttcaaacccattcacttttggatctggcaccaagctggaaattaatggcggaggaggctccggaggaggagggtctggaggaggaggaagtcaggtgcagctgcagcagagcggagcagagctggctcgaccaggagctagtgtgaaaatgtcctgtaaggcaagcggctacaccttcacacggtataccatgcattgggtgaaacagagacccgggcagggactggaatggatcgggtacattaatccttcccgaggatacacaaactacaaccagaagtttaaagacaaggccactctgaccacagataagagctcctctaccgcttatatgcagctgagttcactgacatctgaggacagtgcagtgtactattgcgccaggtactatgacgatcactactccctggattattggggccaggggactaccctgacagtgagctccgcagccgaacctaaatctagtgacaagactcatacctgccccccttgtccagcaccagaggctgcaggaggacctagcgtgttcctgtttccacccaaaccaaaggatactctgatgatctcccggacacctgaagtcacttgtgtggtcgtgagcgtgtctcacgaggaccccgaagtcaagtttaactggtacgtggacggcgtcgaggtgcataatgccaaaaccaagcccagggaggaacagtacaactccacatatcgcgtcgtgtctgtcctgactgtgctgcaccaggattggctgaacggcaaggagtacaaatgcaaggtgagcaacaaggcactgcctgccccaatcgagaagacaattagcaaagcaaaggggcagccccgagaacctcaggtctacgtgctgcctccatctcgggacgagctgactaaaaaccaggtcagtctgctgtgtctggtgaagggcttctatccaagcgatattgctgtggagtgggaatccaatgggcagcccgaaaacaattacctgacttggccccctgtcctggactcagatgggagcttctttctgtatagtaaactgaccgtggacaagtcacggtggcagcagggaaacgtctttagctgttccgtgatgcatgaggccctgcacaatcattacacccagaaatctctgagtctgtcacccggcaagtgaggatcc

SEQ ID NO: 44 - protein, 503 aa, Artificial Sequence
  Description of Artificial Sequence: Synthetic polypeptide
EFATMAVMAPRTLVLLLSGALALTQTWAGQIVLTQSPAIMSASPGEKVTMTCSASSSVSYMNWYQQKSGTSPKRWIYDTSKLASGVPAHFRGSGSGTSYSLTISGMEAEDAATYYCQQWSSNPFTFGSGTKLEINGGGGSGGGGSGGGGSQVQLQQSGAELARPGASVKMSCKASGYTFTRYTMHWVKQRPGQGLEWIGYINPSRGYTNYNQKFKDKATLTTDKSSSTAYMQLSSLTSEDSAVYYCARYYDDHYSLDYWGQGTTLTVSSAAEPKSSDKTHTCPPCPAPEAAGGPSVFLFPPKPKDTLMISRTPEVTCVVVSVSHEDPEVKFNWYVDGVEVHNAKTKPREEQYNSTYRVVSVLTVLHQDWLNGKEYKCKVSNKALPAPIEKTISKAKGQPREPQVYVLPPSRDELTKNQVSLLCLVKGFYPSDIAVEWESNGQPENNYLTWPPVLDSDGSFFLYSKLTVDKSRWQQGNVFSCSVMHEALHNHYTQKSLSLSPGK

SEQ ID NO: 45 - DNA, 1536 bp, Artificial Sequence
  Description of Artificial Sequence: Synthetic polynucleotide
gaattcgccaccatggccgtgatggctcctcgaacactggtcctgctgctgagcggggcactggcactgacacagacttgggctgggcaggtccagctgcagcagagcggagcagagctggctcgaccaggagctagtgtgaaaatgtcatgcaaggcaagcggctacaccttcacacggtatactatgcactgggtgaaacagagacccggacagggcctggaatggatcgggtacattaaccctagccgaggatacaccaactacaaccagaagtttaaagacaaggccaccctgaccacagataagagctcctctacagcttatatgcagctgagttcactgacttctgaggacagtgccgtgtactattgtgctcggtactatgacgatcattactccctggattattgggggcagggaactaccctgaccgtgagctcctctagtacaggaggaggaggcagtggaggaggagggtcaggcggaggaggaagcgacatccagattgtgctgacacagtctccagctatcatgtccgcatctcccggcgagaaagtcactatgacctgctccgcctcaagctccgtgtcttacatgaattggtatcagcagaaatcaggaaccagccccaagagatggatctacgacacatccaagctggcatctggagtgcctgcacacttcaggggcagtgggtcaggaactagctattccctgaccattagcggcatggaggccgaagatgccgctacctactattgtcagcagtggtctagtaacccattcacatttggcagcgggactaagctggagatcaatagggcagccgaacccaaatcaagcgacaagacacatacttgccccccttgtccagctccagaagctgcaggaggaccttccgtgttcctgtttccacccaaaccaaaggatacactgatgattagccgcacccctgaggtcacatgcgtggtcgtgagcgtgagccacgaggaccccgaagtcaagttcaactggtacgtggacggcgtcgaagtgcataatgccaaaaccaagcctagggaggaacagtacaacagtacatatagagtcgtgtcagtgctgaccgtcctgcaccaggattggctgaacggcaaggagtacaaatgcaaggtgtccaacaaggcactgcctgccccaatcgagaagaccatttctaaagctaaggggcagccccgagaacctcaggtctacgtgtatcctccatcccgggacgagctgactaaaaaccaggtctctctgacctgtctggtgaagggcttttacccatctgatattgcagtcgagtgggaaagtaatgggcagcccgagaacaattataagacaactccccctgtgctggactccgatgggtctttcgcactggtcagcaaactgacagtggataagtccagatggcagcagggaaacgtcttttcttgtagtgtgatgcatgaagccctgcacaatcattacactcagaaatcactgagcctgtcccccggcaagtgaggatcc

SEQ ID NO: 46 - protein, 509 aa, Artificial Sequence
  Description of Artificial Sequence: Synthetic polypeptide
EFATMAVMAPRTLVLLLSGALALTQTWAGQVQLQQSGAELARPGASVKMSCKASGYTFTRYTMHWVKQRPGQGLEWIGYINPSRGYTNYNQKFKDKATLTTDKSSSTAYMQLSSLTSEDSAVYYCARYYDDHYSLDYWGQGTTLTVSSSSTGGGGSGGGGSGGGGSDIQIVLTQSPAIMSASPGEKVTMTCSASSSVSYMNWYQQKSGTSPKRWIYDTSKLASGVPAHFRGSGSGTSYSLTISGMEAEDAATYYCQQWSSNPFTFGSGTKLEINRAAEPKSSDKTHTCPPCPAPEAAGGPSVFLFPPKPKDTLMISRTPEVTCVVVSVSHEDPEVKFNWYVDGVEVHNAKTKPREEQYNSTYRVVSVLTVLHQDWLNGKEYKCKVSNKALPAPIEKTISKAKGQPREPQVYVYPPSRDELTKNQVSLTCLVKGFYPSDIAVEWESNGQPENNYKTTPPVLDSDGSFALVSKLTVDKSRWQQGNVFSCSVMHEALHNHYTQKSLSLSPGK

SEQ ID NO: 47 - DNA, 1548 bp, Artificial Sequence
  Description of Artificial Sequence: Synthetic polynucleotide
gaattcgccaccatggctgtgatggcacctagaaccctggtcctgctgctgtccggggcactggcactgactcagacttgggctggggatattcagctgacccagagtcctgcatcactggctgtgagcctgggacagcgagcaacaatctcctgcaaagccagtcagtcagtggactatgatggcgactcctatctgaactggtaccagcagatcccagggcagccccctaagctgctgatctacgacgcttcaaatctggtgagcggcatcccaccacgattcagcggcagcggctctggaaccgattttacactgaacattcacccagtcgagaaggtggacgccgctacctaccattgccagcagtctacagaggacccctggactttcggcgggggaaccaaactggaaatcaagggaggaggaggcagtggcggaggagggtcaggaggaggaggaagccaggtgcagctgcagcagagcggagcagagctggtcagaccaggaagctccgtgaaaatttcctgtaaggcttctggctatgcattttctagttactggatgaattgggtgaagcagaggccaggacagggcctggaatggatcgggcagatttggcccggggatggagacacaaactataatggaaagttcaaaggcaaggccactctgaccgctgacgagtcaagctccactgcttatatgcagctgtctagtctggcaagcgaggattccgccgtctacttttgcgctcggagagaaaccacaactgtgggcaggtactattacgcaatggactactggggccaggggaccacagtcaccgtgtcaagcgcagccgaacccaaatcctctgataagacacacacttgccctccatgtccagcacctgaggctgcaggaggaccaagcgtgttcctgtttccccctaaacctaaggacactctgatgatctctcggactcccgaagtcacctgtgtggtcgtgagcgtgagccacgaggaccctgaagtcaaattcaactggtacgtggatggcgtcgaggtgcataatgccaaaacaaagcctagggaggaacagtataactccacataccgcgtcgtgtctgtcctgactgtgctgcatcaggactggctgaacggaaaggagtacaaatgcaaggtgagcaacaaggcactgccagcccccatcgagaagaccatttccaaagccaagggccagcctcgagaaccacaggtctatgtgctgccacccagccgggacgagctgacaaaaaaccaggtctccctgctgtgtctggtgaagggattctacccttctgatattgctgtggagtgggaaagtaatggccagccagaaaacaattatctgacttggcctccagtgctggattctgacgggagtttctttctgtacagtaaactgaccgtggataagtcacggtggcagcagggaaacgtctttagttgttcagtgatgcacgaggccctgcacaatcattacacccagaaaagcctgtccctgtctcccggcaagtgaggatcc

SEQ ID NO: 48 - protein, 513 aa, Artificial Sequence
  Description of Artificial Sequence: Synthetic polypeptide
EFATMAVMAPRTLVLLLSGALALTQTWAGDIQLTQSPASLAVSLGQRATISCKASQSVDYDGDSYLNWYQQIPGQPPKLLIYDASNLVSGIPPRFSGSGSGTDFTLNIHPVEKVDAATYHCQQSTEDPWTFGGGTKLEIKGGGGSGGGGSGGGGSQVQLQQSGAELVRPGSSVKISCKASGYAFSSYWMNWVKQRPGQGLEWIGQIWPGDGDTNYNGKFKGKATLTADESSSTAYMQLSSLASEDSAVYFCARRETTTVGRYYYAMDYWGQGTTVTVSSAAEPKSSDKTHTCPPCPAPEAAGGPSVFLFPPKPKDTLMISRTPEVTCVVVSVSHEDPEVKFNWYVDGVEVHNAKTKPREEQYNSTYRVVSVLTVLHQDWLNGKEYKCKVSNKALPAPIEKTISKAKGQPREPQVYVLPPSRDELTKNQVSLLCLVKGFYPSDIAVEWESNGQPENNYLTWPPVLDSDGSFFLYSKLTVDKSRWQQGNVFSCSVMHEALHNHYTQKSLSLSPGK

SEQ ID NO: 49 - DNA, 1527 bp, Artificial Sequence
  Description of Artificial Sequence: Synthetic polynucleotide
gaattcgcgaccatggctgtgatggctccacgaaccctggtcctgctgctgtccggggctctggcactgactcagacttgggctggggatattaagctgcagcagagcggagcagagctggctcgacctggagcctctgtgaaaatgagttgcaagacatcaggctacaccttcacacggtatactatgcactgggtgaaacagagacccggccagtgtctggaatggatcgggtatattaaccctagccgaggatacaccaactacaaccagaagtttaaagacaaggcaaccctgaccacagataagagctcctctacagcctacatgcagctgagttcactgacttctgaggacagtgccgtgtactattgcgctaggtactatgacgatcattactgtctggattattggggccaggggactaccctgactgtcagctccgtggaaggagggtcaggaggcagcggaggcagcggagggtctggaggcgtggacgatatccagctgacccagtctccagctattatgtccgcatctcccggcgagaaagtgactatgacctgccgcgcctctagttcagtgtcctacatgaactggtatcagcagaaaagtggaacctcacccaagagatggatctacgacacaagcaaggtcgcttccggcgtgccttataggttcagtggatcaggcagcgggacttcctactctctgaccattagctccatggaggcagaagatgccgctacctactattgccagcagtggtctagtaatccactgacatttggatgtggcactaaactggagctgaaggcagccgaacccaaatcaagcgacaagacacacacttgcccaccttgtccagcaccagaagctgcaggaggacctagcgtgttcctgtttccacccaaaccaaaggatacactgatgatctcccggacccctgaggtcacatgcgtggtggtgagcgtgagccacgaggacccagaagtcaagttcaactggtacgtggatggcgtcgaagtgcataatgcaaaaactaagcccagggaggaacagtacaactctacttatcgcgtcgtgagtgtcctgaccgtgctgcatcaggactggctgaacggcaaggagtacaaatgcaaggtgtctaacaaggccctgcctgccccaatcgagaagacaattagcaaagctaaggggcagccccgagaacctcaggtctacgtgtatcctccaagtcgggacgagctgaccaaaaaccaggtctccctgacatgtctggtgaagggcttttatccatccgatattgccgtggagtgggaatctaatgggcagcccgagaacaattacaagacaactccccctgtgctggacagcgatgggtccttcgctctggtctcaaaactgaccgtggataagagcagatggcagcagggaaatgtctttagctgctccgtgatgcacgaggcactgcacaaccattacacccagaagtcactgtcactgtccccaggcaagtgaggatcc

SEQ ID NO: 50 - protein, 506 aa, Artificial Sequence
  Description of Artificial Sequence: Synthetic polypeptide
EFATMAVMAPRTLVLLLSGALALTQTWAGDIKLQQSGAELARPGASVKMSCKTSGYTFTRYTMHWVKQRPGQCLEWIGYINPSRGYTNYNQKFKDKATLTTDKSSSTAYMQLSSLTSEDSAVYYCARYYDDHYCLDYWGQGTTLTVSSVEGGSGGSGGSGGSGGVDDIQLTQSPAIMSASPGEKVTMTCRASSSVSYMNWYQQKSGTSPKRWIYDTSKVASGVPYRFSGSGSGTSYSLTISSMEAEDAATYYCQQWSSNPLTFGCGTKLELKAAEPKSSDKTHTCPPCPAPEAAGGPSVFLFPPKPKDTLMISRTPEVTCVVVSVSHEDPEVKFNWYVDGVEVHNAKTKPREEQYNSTYRVVSVLTVLHQDWLNGKEYKCKVSNKALPAPIEKTISKAKGQPREPQVYVYPPSRDELTKNQVSLTCLVKGFYPSDIAVEWESNGQPENNYKTTPPVLDSDGSFALVSKLTVDKSRWQQGNVFSCSVMHEALHNHYTQKSLSLSPGK

SEQ ID NO: 51 - DNA, 1548 bp, Artificial Sequence; identical to SEQ ID NO: 47
  Description of Artificial Sequence: Synthetic polynucleotide

SEQ ID NO: 52 - protein, 513 aa, Artificial Sequence; identical to SEQ ID NO: 48
  Description of Artificial Sequence: Synthetic polypeptide

SEQ ID NO: 53 - DNA, 1545 bp, Artificial Sequence
  Description of Artificial Sequence: Synthetic polynucleotide
gaattcgccaccatggccgtgatggcacctagaaccctggtcctgctgctgagcggggcactggcactgacacagacatgggccggagaagtccagctggtcgagtccggaggaggactggtgcagccaggagggtcactgaaactgagctgcgccgcttccggcttcacttttaacaagtatgcaatgaattgggtgcggcaggcaccagggaagggactggaatgggtggcccggatcagatctaagtacaacaactacgctacctactatgcagacagtgtgaaggataggttcacaatttctcgcgacgatagtaaaaacactgcttacctgcagatgaacaatctgaagacagaggacactgcagtctactattgcgtgagacacggaaactttggcaatagctacatctcctattgggcatactggggacagggaaccctggtcacagtgagctccggaggaggaggcagcggaggaggaggctctgggggaggcgggagtcagactgtggtcacccaggagccctcactgacagtcagccctggaggcactgtgaccctgacatgtgggtctagtaccggagccgtgacatctggcaactatcccaattgggtgcagcagaaacctggacaggctccacgaggactgattggaggaacaaagttcctggcccccggaactcctgctcgattttccggctctctgctgggagggaaagcagcactgaccctgagcggagtgcagcctgaggatgaagccgagtactattgcgtgctgtggtacagcaacagatgggtgttcggaggcgggacaaagctgactgtgctggctgcagagccaaagtcaagcgacaaaactcacacctgcccaccttgtccagctccagaagcagctggaggaccatccgtgttcctgtttccacccaagcccaaagatacactgatgatctctcgcactcccgaggtcacctgtgtggtcgtgagtgtgtcacacgaagaccctgaggtcaagtttaactggtacgtggatggcgtcgaagtgcataatgccaagaccaaacctcgagaggaacagtataattcaacttaccgggtcgtgagcgtcctgaccgtgctgcatcaggactggctgaacggaaaggagtacaagtgcaaagtgagcaataaggcactgcctgccccaatcgaaaaaaccattagcaaggctaaagggcagccaagagagccccaggtctacgtgtatcctccaagcagggacgaactgaccaagaaccaggtctccctgacatgtctggtgaaagggttctatcctagtgatattgcagtggaatgggagtcaaatggacagccagagaacaattacaagaccacaccccctgtgctggactctgatggcagtttcgcactggtctccaagctgaccgtggataaatctaggtggcagcaggggaacgtctttagctgttccgtgatgcatgaagccctgcacaatcattacacacagaagtctctgagtctgtcacccggcaaatgaggatcc

SEQ ID NO: 54 - protein, 512 aa, Artificial Sequence
  Description of Artificial Sequence: Synthetic polypeptide
EFATMAVMAPRTLVLLLSGALALTQTWAGEVQLVESGGGLVQPGGSLKLSCAASGFTFNKYAMNWVRQAPGKGLEWVARIRSKYNNYATYYADSVKDRFTISRDDSKNTAYLQMNNLKTEDTAVYYCVRHGNFGNSYISYWAYWGQGTLVTVSSGGGGSGGGGSGGGGSQTVVTQEPSLTVSPGGTVTLTCGSSTGAVTSGNYPNWVQQKPGQAPRGLIGGTKFLAPGTPARFSGSLLGGKAALTLSGVQPEDEAEYYCVLWYSNRWVFGGGTKLTVLAAEPKSSDKTHTCPPCPAPEAAGGPSVFLFPPKPKDTLMISRTPEVTCVVVSVSHEDPEVKFNWYVDGVEVHNAKTKPREEQYNSTYRVVSVLTVLHQDWLNGKEYKCKVSNKALPAPIEKTISKAKGQPREPQVYVYPPSRDELTKNQVSLTCLVKGFYPSDIAVEWESNGQPENNYKTTPPVLDSDGSFALVSKLTVDKSRWQQGNVFSCSVMHEALHNHYTQKSLSLSPGK

SEQ ID NO: 55 - DNA, 1542 bp, Artificial Sequence
  Description of Artificial Sequence: Synthetic polynucleotide
gaattcgccaccatggccgtgatggcacctagaacactggtcctgctgctgagcggagccctggcactgacacagacatgggccggggaagtccagctggtcgagtctggaggaggactggtgaagccaggagggagtctgaaactgtcatgcgccgctagcgggtataccttcacaagctacgtcatgcactgggtgaggcaggcaccagggaagggactggaatggatcggctatattaatccctacaacgacgggactaagtataatgagaaatttcagggcagggtgaccatcagctccgataagtctattagtacagcctacatggagctgtctagtctgcgcagcgaagacacagcaatgtactattgcgccagggggacatactattacggaactcgcgtgttcgattactggggccaggggaccctggtcacagtgtcaagcggaggcgggggaagtggaggaggaggctcaggaggaggagggagcgacatcgtgatgacccagtcccctgctacactgtcactgagcccaggcgagcgggcaactctgtcctgtagatcctctaagtctctgcagaacgtgaatggaaacacctatctgtactggtttcagcagaaaccaggccagagcccccagctgctgatctatagaatgtccaatctgaactctggcgtgcctgataggttctccggatctggcagtgggaccgagttcaccctgaccattagttcactggagccagaagacttcgccgtgtattactgcatgcagcacctggagtaccccatcacttttggagctggcaccaagctggagatcaaggcagccgaaccaaagagctccgataaaacacatacttgcccaccttgtccagcaccagaagctgcaggaggaccaagcgtgttcctgtttccacccaagcctaaagacaccctgatgatctcccggactcccgaggtcacctgtgtggtcgtgtcagtgagccacgaggaccctgaagtcaagttcaattggtacgtggatggcgtcgaagtgcataacgctaagacaaaaccccgagaggaacagtataacagtacataccgggtcgtgtcagtgctgaccgtcctgcaccaggattggctgaatggaaaggagtacaagtgcaaagtgtctaacaaggccctgcctgctccaatcgagaaaaccattagcaaggctaaaggccagccccgcgaacctcaggtctatgtgctgcctccaagccgagatgagctgacaaagaatcaggtctccctgctgtgtctggtgaaagggttctacccttctgacattgcagtggagtgggaaagtaacggacagccagagaacaattatctgacatggccccctgtcctggactccgatggctctttctttctgtacagcaagctgactgtggacaaatccagatggcagcaggggaatgtcttttcctgttctgtgatgcatgaagccctgcacaaccattacacccagaagagtctgtcactgagccctggcaaatgaggatcc

SEQ ID NO: 56 - protein, 511 aa, Artificial Sequence
  Description of Artificial Sequence: Synthetic polypeptide
EFATMAVMAPRTLVLLLSGALALTQTWAGEVQLVESGGGLVKPGGSLKLSCAASGYTFTSYVMHWVRQAPGKGLEWIGYINPYNDGTKYNEKFQGRVTISSDKSISTAYMELSSLRSEDTAMYYCARGTYYYGTRVFDYWGQGTLVTVSSGGGGSGGGGSGGGGSDIVMTQSPATLSLSPGERATLSCRSSKSLQNVNGNTYLYWFQQKPGQSPQLLIYRMSNLNSGVPDRFSGSGSGTEFTLTISSLEPEDFAVYYCMQHLEYPITFGAGTKLEIKAAEPKSSDKTHTCPPCPAPEAAGGPSVFLFPPKPKDTLMISRTPEVTCVVVSVSHEDPEVKFNWYVDGVEVHNAKTKPREEQYNSTYRVVSVLTVLHQDWLNGKEYKCKVSNKALPAPIEKTISKAKGQPREPQVYVLPPSRDELTKNQVSLLCLVKGFYPSDIAVEWESNGQPENNYLTWPPVLDSDGSFFLYSKLTVDKSRWQQGNVFSCSVMHEALHNHYTQKSLSLSPGK

SEQ ID NO: 57 - DNA, 1545 bp, Artificial Sequence
  Description of Artificial Sequence: Synthetic polynucleotide
gaattcgccaccatggccgtgatggcacctagaacactggtcctgctgctgagcggggcactggcactgacacagacatgggccggagaagtccagctggtcgagtccggaggaggactggtgcagccaggagggtcactgaaactgagctgcgccgcttccggcttcacttttaacaagtatgcaatgaattgggtgcggcaggcacctgggaagtgtctggaatgggtggcccggatcagatctaagtacaacaactacgctacctactatgcagacagtgtgaaggataggttcacaatttctcgcgacgatagtaaaaacactgcttacctgcagatgaacaatctgaagacagaggacactgcagtctactattgcgtgagacacggaaactttggcaatagctacatctcctattgggcctactgggggcagggaaccctggtcacagtgagctccggaggaggaggcagcggaggaggaggctctgggggaggcgggagtcagactgtggtcacccaggagccctcactgacagtcagccctggaggcactgtgaccctgacatgtgggtctagtaccggagccgtgacatctggcaactatcccaattgggtgcagcagaaacctggacaggctccacgaggactgattggaggaacaaagttcctggcccccggaactcctgctcgattttccggctctctgctgggagggaaagcagcactgaccctgagcggagtgcagcctgaggatgaagccgagtactattgcgtgctgtggtacagcaacagatgggtgttcggctgtgggacaaagctgactgtgctggctgcagagccaaagtcaagcgacaaaactcacacctgcccaccttgtccagctccagaagcagctggaggaccatccgtgttcctgtttccacccaagcccaaagatacactgatgatctctcgcactcccgaggtcacctgcgtggtcgtgagtgtgtcacacgaagaccctgaggtcaagtttaactggtacgtggatggcgtcgaagtgcataatgccaagaccaaacctcgagaggaacagtataattcaacttaccgggtcgtgagcgtcctgaccgtgctgcatcaggactggctgaacgggaaggagtacaagtgcaaagtgagcaataaggcactgcctgccccaatcgaaaaaaccattagcaaggctaaaggccagccaagagagccccaggtctacgtgtatcctccaagcagggacgaactgaccaagaaccaggtctccctgacatgtctggtgaaagggttctatcctagtgatattgcagtggaatgggagtcaaatggacagccagagaacaattacaagaccacaccccctgtgctggactctgatggaagtttcgcactggtctccaagctgaccgtggataaatctaggtggcagcagggcaacgtctttagctgttccgtgatgcatgaagccctgcacaatcattacacacagaagtctctgagtctgtcacccggcaaatgaggatcc

SEQ ID NO: 58 - protein, 512 aa, Artificial Sequence
  Description of Artificial Sequence: Synthetic polypeptide
EFATMAVMAPRTLVLLLSGALALTQTWAGEVQLVESGGGLVQPGGSLKLSCAASGFTFNKYAMNWVRQAPGKCLEWVARIRSKYNNYATYYADSVKDRFTISRDDSKNTAYLQMNNLKTEDTAVYYCVRHGNFGNSYISYWAYWGQGTLVTVSSGGGGSGGGGSGGGGSQTVVTQEPSLTVSPGGTVTLTCGSSTGAVTSGNYPNWVQQKPGQAPRGLIGGTKFLAPGTPARFSGSLLGGKAALTLSGVQPEDEAEYYCVLWYSNRWVFGCGTKLTVLAAEPKSSDKTHTCPPCPAPEAAGGPSVFLFPPKPKDTLMISRTPEVTCVVVSVSHEDPEVKFNWYVDGVEVHNAKTKPREEQYNSTYRVVSVLTVLHQDWLNGKEYKCKVSNKALPAPIEKTISKAKGQPREPQVYVYPPSRDELTKNQVSLTCLVKGFYPSDIAVEWESNGQPENNYKTTPPVLDSDGSFALVSKLTVDKSRWQQGNVFSCSVMHEALHNHYTQKSLSLSPGK

SEQ ID NO: 59 - DNA, 1542 bp, Artificial Sequence
  Description of Artificial Sequence: Synthetic polynucleotide
gaattcgccaccatggctgtgatggcacctagaacactggtcctgctgctgagcggggcactggcactgacacagacatgggccggggaagtccagctggtcgagtctggaggaggactggtgaagccaggagggagtctgaaactgtcatgcgccgctagcggctataccttcacaagctacgtcatgcactgggtgaggcaggcccctgggaagtgtctggaatggatcggatatattaatccctacaacgacggcactaagtataatgagaaatttcaggggagggtgaccatcagctccgataagtctattagtacagcttacatggagctgtctagtctgcgcagcgaagacacagcaatgtactattgcgccaggggaacatactattacggcactcgcgtgttcgattactgggggcagggaaccctggtcacagtgtcaagcggaggcgggggaagtggaggaggaggctcaggaggaggagggagcgacatcgtgatgacccagtcccctgctacactgtcactgagcccaggggagcgggcaactctgtcctgtagatcctctaagtctctgcagaacgtgaatggaaacacctatctgtactggtttcagcagaaaccaggccagagcccccagctgctgatctatagaatgtccaatctgaactctggcgtgcctgataggttctccggctctgggagtggaaccgagttcaccctgaccattagttcactggagccagaagacttcgctgtgtattactgcatgcagcacctggagtaccccatcacttttggctgtgggaccaagctggagatcaaggcagccgaaccaaagagctccgataaaacacatacttgcccaccttgtccagcaccagaagctgcaggaggaccaagcgtgttcctgtttccacccaagcctaaagacaccctgatgatctcccgaactccagaggtcacctgcgtggtcgtgtcagtgagccacgaggaccctgaagtcaagttcaattggtacgtggatggcgtcgaagtgcataacgccaagacaaaaccccgagaggaacagtataacagtacataccgggtcgtgtcagtgctgaccgtcctgcaccaggattggctgaatggaaaggagtacaagtgcaaagtgtctaacaaggccctgcctgctccaatcgagaaaaccattagcaaggcaaaaggccagccccgcgaacctcaggtctatgtgctgcctccaagccgagatgagctgacaaagaatcaggtctccctgctgtgtctggtgaaagggttctacccttctgacattgccgtggagtgggaaagtaacggacagccagagaacaattatctgacatggccccctgtcctggactccgatggctctttctttctgtacagcaagctgactgtggacaaatccagatggcagcaggggaatgtcttttcctgttctgtgatgcatgaagccctgcacaaccattacacccagaagagtctgtcactgagccctggcaaatgaggatcc

SEQ ID NO: 60 - protein, 511 aa, Artificial Sequence
  Description of Artificial Sequence: Synthetic polypeptide
EFATMAVMAPRTLVLLLSGALALTQTWAGEVQLVESGGGLVKPGGSLKLSCAASGYTFTSYVMHWVRQAPGKCLEWIGYINPYNDGTKYNEKFQGRVTISSDKSISTAYMELSSLRSEDTAMYYCARGTYYYGTRVFDYWGQGTLVTVSSGGGGSGGGGSGGGGSDIVMTQSPATLSLSPGERATLSCRSSKSLQNVNGNTYLYWFQQKPGQSPQLLIYRMSNLNSGVPDRFSGSGSGTEFTLTISSLEPEDFAVYYCMQHLEYPITFGCGTKLEIKAAEPKSSDKTHTCPPCPAPEAAGGPSVFLFPPKPKDTLMISRTPEVTCVVVSVSHEDPEVKFNWYVDGVEVHNAKTKPREEQYNSTYRVVSVLTVLHQDWLNGKEYKCKVSNKALPAPIEKTISKAKGQPREPQVYVLPPSRDELTKNQVSLLCLVKGFYPSDIAVEWESNGQPENNYLTWPPVLDSDGSFFLYSKLTVDKSRWQQGNVFSCSVMHEALHNHYTQKSLSLSPGK

SEQ ID NO: 61 - DNA, 1535 bp, Artificial Sequence
  Description of Artificial Sequence: Synthetic polynucleotide
ccatggccgtgatggcacctagaaccctggtcctgctgctgagcggggcactggcactgacacagacatgggccggagaagtccagctggtcgagtccggaggaggactggtgcagccaggagggtcactgaaactgagctgcgccgcttccggcttcacttttaacaagtatgcaatgaattgggtgcggcaggcaccagggaagggactggaatgggtggcccggatcagatctaagtacaacaactacgctacctactatgcagacagtgtgaaggataggttcacaatttctcgcgacgatagtaaaaacactgcttacctgcagatgaacaatctgaagacagaggacactgcagtctactattgcgtgagacacggaaactttggcaatagctacatctcctattgggcatactggggacagggaaccctggtcacagtgagctccggaggaggaggcagcggaggaggaggctctgggggaggcgggagtcagactgtggtcacccaggagccctcactgacagtcagccctggaggcactgtgaccctgacatgtgggtctagtaccggagccgtgacatctggcaactatcccaattgggtgcagcagaaacctggacaggctccacgaggactgattggaggaacaaagttcctggcccccggaactcctgctcgattttccggctctctgctgggagggaaagcagcactgaccctgagcggagtgcagcctgaggatgaagccgagtactattgcgtgctgtggtacagcaacagatgggtgttcggaggcgggacaaagctgactgtgctggctgcagagccaaagtcaagcgacaaaactcacacctgcccaccttgtccagctccagaagcagctggaggaccatccgtgttcctgtttccacccaagcccaaagatacactgatgatctctcgcactcccgaggtcacctgtgtggtcgtgagtgtgtcacacgaagaccctgaggtcaagtttaactggtacgtggatggcgtcgaagtgcataatgccaagaccaaacctcgagaggaacagtataattcaacttaccgggtcgtgagcgtcctgaccgtgctgcatcaggactggctgaacggaaaggagtacaagtgcaaagtgagcaataaggcactgcctgccccaatcgaaaaaaccattagcaaggctaaagggcagccaagagagccccaggtctacgtgtatcctccaagcagggacgaactgaccaagaaccaggtctccctgacatgtctggtgaaagggttctatcctagtgatattgcagtggaatgggagtcaaatggacagccagagaacaattacaagaccacaccccctgtgctggactctgatggcagtttcgcactggtctccaagctgaccgtggataaatctaggtggcagcaggggaacgtctttagctgttccgtgatgcatgaagccctgcacaatcattacacacagaagtctctgagtctgtcacccggcaaatgaggatcc

SEQ ID NO: 62 - protein, 512 aa, Artificial Sequence; identical to SEQ ID NO: 54
  Description of Artificial Sequence: Synthetic polypeptide

SEQ ID NO: 63 - DNA, 1542 bp, Artificial Sequence
  Description of Artificial Sequence: Synthetic polynucleotide
gaattcgccaccatggccgtgatggcacctagaaccctggtcctgctgctgagcggggcactggcactgacacagacttgggctggggatatcgtgatgacacagtcccctgctactctgtctctgagtccaggcgagcgggcaactctgtcctgcagaagctccaagtctctgcagaacgtgaatggaaacacctatctgtactggttccagcagaaaccaggccagagcccccagctgctgatctatagaatgagtaatctgaactcaggcgtgcccgataggttctcagggagcggcagcggcaccgagtttaccctgacaatttctagtctggagccagaagacttcgccgtgtactattgcatgcagcacctggagtaccccatcacctttggggctggaacaaagctggagatcaagggaggaggaggcagtggcggaggagggtcaggaggaggaggaagcgaggtccagctggtggaatctggcggaggactggtgaagcctggagggagcctgaaactgtcctgtgccgcttctgggtatactttcaccagctacgtcatgcattgggtgcggcaggcaccaggcaagggactggaatggatcggctatattaatccctacaacgacgggactaagtataatgagaaatttcagggcagggtgaccatctcaagcgataagtctattagtacagcctacatggagctgtcctctctgcgcagcgaagacacagcaatgtactattgcgccagggggacttactattacggaacccgcgtgttcgattactggggacagggcaccctggtcacagtgagttcagcagccgaacctaagagctccgacaaaacacacacttgcccaccttgtccagcaccagaggctgcaggaggaccaagcgtgttcctgtttccacccaagcctaaagataccctgatgatctccagaactcccgaagtcacctgtgtggtcgtgtcagtgagccacgaggaccctgaagtcaagtttaattggtacgtggatggcgtcgaggtgcataacgctaagacaaaaccacgagaggaacagtataacagtacataccgggtcgtgtcagtgctgaccgtcctgcatcaggactggctgaatggaaaggagtacaagtgcaaagtgtctaacaaggccctgcctgctccaatcgagaaaaccattagcaaggctaaaggccagccccgcgaacctcaggtctatgtgctgcctccaagccgagatgagctgacaaagaatcaggtctccctgctgtgtctggtgaaagggttctacccttctgacattgcagtggagtgggaaagtaacggacagccagaaaacaattatctgacatggccccctgtcctggactccgatggctctttctttctgtacagcaagctgactgtggataaatccaggtggcagcaggggaatgtcttttcctgttctgtgatgcacgaggccctgcacaaccattacacccagaagagtctgtcactgagccccggcaaatgaggatcc

SEQ ID NO: 64 - protein, 511 aa, Artificial Sequence
  Description of Artificial Sequence: Synthetic polypeptide
EFATMAVMAPRTLVLLLSGALALTQTWAGDIVMTQSPATLSLSPGERATLSCRSSKSLQNVNGNTYLYWFQQKPGQSPQLLIYRMSNLNSGVPDRFSGSGSGTEFTLTISSLEPEDFAVYYCMQHLEYPITFGAGTKLEIKGGGGSGGGGSGGGGSEVQLVESGGGLVKPGGSLKLSCAASGYTFTSYVMHWVRQAPGKGLEWIGYINPYNDGTKYNEKFQGRVTISSDKSISTAYMELSSLRSEDTAMYYCARGTYYYGTRVFDYWGQGTLVTVSSAAEPKSSDKTHTCPPCPAPEAAGGPSVFLFPPKPKDTLMISRTPEVTCVVVSVSHEDPEVKFNWYVDGVEVHNAKTKPREEQYNSTYRVVSVLTVLHQDWLNGKEYKCKVSNKALPAPIEKTISKAKGQPREPQVYVLPPSRDELTKNQVSLLCLVKGFYPSDIAVEWESNGQPENNYLTWPPVLDSDGSFFLYSKLTVDKSRWQQGNVFSCSVMHEALHNHYTQKSLSLSPGK

SEQ ID NO: 65 - DNA, 1545 bp, Artificial Sequence; identical to SEQ ID NO: 57
  Description of Artificial Sequence: Synthetic polynucleotide

SEQ ID NO: 66 - protein, 512 aa, Artificial Sequence; identical to SEQ ID NO: 58
  Description of Artificial Sequence: Synthetic polypeptide

SEQ ID NO: 67 - DNA, 1542 bp, Artificial Sequence
  Description of Artificial Sequence: Synthetic polynucleotide
gaattcgccaccatggctgtgatggcacctagaacactggtcctgctgctgtccggggcactggcactgactcagacttgggctggggatattgtgatgacacagtcccctgctactctgtctctgagtccaggggagcgggcaactctgtcctgcagaagctccaagtctctgcagaacgtgaatggaaacacctatctgtactggttccagcagaaaccaggccagagcccccagctgctgatctatagaatgagtaatctgaactcaggcgtgcccgataggttctcagggagcggcagcggcaccgagtttaccctgacaatttctagtctggagccagaagacttcgccgtgtactattgcatgcagcacctggagtaccccatcacctttgggtgtggaacaaagctggagatcaagggaggaggaggcagtggcggaggagggtcaggaggaggaggaagcgaggtccagctggtggaatctggcggaggactggtgaagcctggagggagcctgaaactgtcctgcgccgcttctggctatactttcaccagctacgtcatgcattgggtgcggcaggcacctgggaagtgtctggaatggatcggatatattaatccctacaacgacggcactaagtataatgagaaatttcaggggagggtgaccatctcaagcgataagtctattagtacagcttacatggagctgtcctctctgcgcagcgaagacacagcaatgtactattgcgccaggggaacttactattacggcacccgcgtgttcgattactggggccaggggaccctggtcacagtgagttcagcagccgaacctaagagctccgacaaaacacacacttgcccaccttgtccagctccagaggctgcaggaggaccaagcgtgttcctgtttccacccaagcctaaagataccctgatgatctccagaactcccgaagtcacctgtgtggtcgtgtcagtgagccacgaggaccctgaagtcaagtttaattggtacgtggatggcgtcgaggtgcataacgccaagacaaaaccacgagaggaacagtataacagtacataccgggtcgtgtcagtgctgaccgtcctgcatcaggactggctgaatggaaaggagtacaagtgcaaagtgtctaacaaggccctgcctgctccaatcgagaaaaccattagcaaggcaaaaggccagccccgcgaacctcaggtctatgtgctgcctccaagccgagatgagctgacaaagaatcaggtctccctgctgtgtctggtgaaagggttctacccttctgacattgccgtggagtgggaaagtaacggacagccagaaaacaattatctgacatggccccctgtcctggactccgatggctctttctttctgtacagcaagctgactgtggataaatccaggtggcagcaggggaatgtcttttcctgttctgtgatgcacgaggccctgcacaaccattacacccagaagagtctgtcactgagccccggcaaatgaggatcc

SEQ ID NO: 68 - protein, 511 aa, Artificial Sequence
  Description of Artificial Sequence: Synthetic polypeptide
EFATMAVMAPRTLVLLLSGALALTQTWAGDIVMTQSPATLSLSPGERATLSCRSSKSLQNVNGNTYLYWFQQKPGQSPQLLIYRMSNLNSGVPDRFSGSGSGTEFTLTISSLEPEDFAVYYCMQHLEYPITFGCGTKLEIKGGGGSGGGGSGGGGSEVQLVESGGGLVKPGGSLKLSCAASGYTFTSYVMHWVRQAPGKCLEWIGYINPYNDGTKYNEKFQGRVTISSDKSISTAYMELSSLRSEDTAMYYCARGTYYYGTRVFDYWGQGTLVTVSSAAEPKSSDKTHTCPPCPAPEAAGGPSVFLFPPKPKDTLMISRTPEVTCVVVSVSHEDPEVKFNWYVDGVEVHNAKTKPREEQYNSTYRVVSVLTVLHQDWLNGKEYKCKVSNKALPAPIEKTISKAKGQPREPQVYVLPPSRDELTKNQVSLLCLVKGFYPSDIAVEWESNGQPENNYLTWPPVLDSDGSFFLYSKLTVDKSRWQQGNVFSCSVMHEALHNHYTQKSLSLSPGK

SEQ ID NO: 69 - DNA, 1545 bp, Artificial Sequence; identical to SEQ ID NO: 53
  Description of Artificial Sequence: Synthetic polynucleotide

SEQ ID NO: 70 - protein, 512 aa, Artificial Sequence; identical to SEQ ID NO: 54
  Description of Artificial Sequence: Synthetic polypeptide

SEQ ID NO: 71 - DNA, 1527 bp, Artificial Sequence
  Description of Artificial Sequence: Synthetic polynucleotide
gaattcgccaccatggctgtgatggcacctcgcaccctggtcctgctgctgagcggggcactggcactgacacagacatgggctggggaagtccagctggtccagagcggggctgaggtgaagaaaccaggagaaagcctgaaaatctcctgcaagggcagcggctactctttcagctcctcttggattggatgggtgcgccagatgccagggaagggactggagtggatgggcatcatctaccctgacgattctgacaccagatattctccaagttttcagggccaagtgactatctctgctgataaaagtattaggaccgcatatctgcagtggagttcactgaaggcaagcgacacagccatgtactattgcgcccgacacgtcactatgatctggggcgtgatcattgatttctggggccagggaaccctggtcacagtgagctccggcggaggaggctccggaggaggagggtctggaggcgggggaagtgcaattcagctgacacagagcccttctagtctgtcagcaagcgtcggcgaccgagtgaccatcacatgtagagcttcccaggggatttcaagcgctctggcatggtaccagcagaagccaggcaaagcccccaagctgctgatctatgatgcttcctctctggagtcaggggtgccaagcaggttctccggatctggcagtgggaccgactttactctgaccattagttcactgcagcccgaagatttcgctacatactattgccagcagttcaactcctacccttatacatttggacagggcactaaactggagatcaaggccgctgaacccaaaagctccgacaagacacacacttgccccccttgtccagcaccagaagcagcaggaggaccatctgtgttcctgtttccacccaagcctaaagataccctgatgattagccggactcctgaggtgacctgtgtggtcgtgtcagtgagccacgaggacccagaagtcaagtttaactggtacgtggatggcgtcgaagtgcataatgccaagacaaaacctagggaggaacagtacaattcaacctatcgcgtcgtgagcgtcctgacagtgctgcatcaggactggctgaacgggaaggagtataagtgcaaagtgagcaacaaggccctgcctgctccaatcgagaagacaatttccaaggcaaaaggccagccccgagaacctcaggtctacgtgctgcctccatctcgggacgagctgactaaaaaccaggtcagcctgctgtgtctggtgaaggggttctatccaagtgatatcgccgtggagtgggaatccaatggacagcccgagaacaattacctgacttggccccctgtgctggacagtgatggatcattctttctgtattccaaactgaccgtggataagtctcggtggcagcagggcaacgtcttttcctgttctgtgatgcatgaagccctgcacaatcattacacccagaaaagtctgtcactgagccccggcaagtgaggatcc

SEQ ID NO: 72 - protein, 506 aa, Artificial Sequence
  Description of Artificial Sequence: Synthetic polypeptide
EFATMAVMAPRTLVLLLSGALALTQTWAGEVQLVQSGAEVKKPGESLKISCKGSGYSFSSSWIGWVRQMPGKGLEWMGIIYPDDSDTRYSPSFQGQVTISADKSIRTAYLQWSSLKASDTAMYYCARHVTMIWGVIIDFWGQGTLVTVSSGGGGSGGGGSGGGGSAIQLTQSPSSLSASVGDRVTITCRASQGISSALAWYQQKPGKAPKLLIYDASSLESGVPSRFSGSGSGTDFTLTISSLQPEDFATYYCQQFNSYPYTFGQGTKLEIKAAEPKSSDKTHTCPPCPAPEAAGGPSVFLFPPKPKDTLMISRTPEVTCVVVSVSHEDPEVKFNWYVDGVEVHNAKTKPREEQYNSTYRVVSVLTVLHQDWLNGKEYKCKVSNKALPAPIEKTISKAKGQPREPQVYVLPPSRDELTKNQVSLLCLVKGFYPSDIAVEWESNGQPENNYLTWPPVLDSDGSFFLYSKLTVDKSRWQQGNVFSCSVMHEALHNHYTQKSLSLSPGK

SEQ ID NO: 73 - DNA, 1545 bp, Artificial Sequence; identical to SEQ ID NO: 57
  Description of Artificial Sequence: Synthetic polynucleotide

SEQ ID NO: 74 - protein, 512 aa, Artificial Sequence; identical to SEQ ID NO: 58
  Description of Artificial Sequence: Synthetic polypeptide

SEQ ID NO: 75 - DNA, 1527 bp, Artificial Sequence
  Description of Artificial Sequence: Synthetic polynucleotide
gaattcgccaccatggccgtgatggctccaagaaccctggtcctgctgctgagtggggctctggctctgacacagacctgggctggggaagtgcagctggtccagagcggagctgaggtgaagaaaccaggcgaaagcctgaaaatctcctgcaagggcagcggctactctttcagctcctcttggattgggtgggtgcgccagatgcccggaaagtgtctggagtggatgggcatcatctaccctgacgattctgacaccagatattctccaagttttcagggccaagtgactatctctgctgataaaagtattaggaccgcatatctgcagtggagttcactgaaggcaagcgacacagccatgtactattgcgcccgacacgtcactatgatctggggcgtgatcattgatttctgggggcagggaaccctggtcacagtgagctccggcggaggaggctccggaggaggagggtctggaggcgggggaagtgcaattcagctgacacagagcccttctagtctgtcagcaagcgtcggggaccgagtgaccatcacatgtagagcttcccagggaatttcaagcgctctggcatggtaccagcagaagccaggaaaagcccccaagctgctgatctatgatgcttcctctctggagtcaggcgtgccaagcaggttctccggctctgggagtggaaccgactttactctgaccattagttcactgcagcccgaagatttcgctacatactattgccagcagttcaactcctacccttatacatttggctgtgggactaaactggagatcaaggccgctgaacccaaaagctccgacaagacacacacttgccccccttgtccagcaccagaagcagcaggaggaccatctgtgttcctgtttccacccaagcctaaagataccctgatgattagccggactcctgaggtgacctgcgtggtcgtgtcagtgagccacgaggacccagaagtcaagtttaactggtacgtggatggcgtcgaagtgcataatgccaagacaaaacctagggaggaacagtacaattcaacctatcgcgtcgtgagcgtcctgacagtgctgcatcaggactggctgaacggcaaggagtataagtgcaaagtgagcaacaaggccctgcctgctccaatcgagaagacaatttccaaggcaaaagggcagccccgagaacctcaggtctacgtgctgcctccatctcgggacgagctgactaaaaaccaggtcagcctgctgtgtctggtgaagggcttctatccaagtgatatcgccgtggagtgggaatccaatgggcagcccgagaacaattacctgacttggccccctgtgctggacagtgatgggtcattctttctgtattccaaactgaccgtggataagtctcggtggcagcagggaaacgtcttttcctgttctgtgatgcatgaagccctgcacaatcattacacccagaaaagtctgtcactgagccccggcaagtgaggatcc

SEQ ID NO: 76 - protein, 506 aa, Artificial Sequence
  Description of Artificial Sequence: Synthetic polypeptide
EFATMAVMAPRTLVLLLSGALALTQTWAGEVQLVQSGAEVKKPGESLKISCKGSGYSFSSSWIGWVRQMPGKCLEWMGIIYPDDSDTRYSPSFQGQVTISADKSIRTAYLQWSSLKASDTAMYYCARHVTMIWGVIIDFWGQGTLVTVSSGGGGSGGGGSGGGGSAIQLTQSPSSLSASVGDRVTITCRASQGISSALAWYQQKPGKAPKLLIYDASSLESGVPSRFSGSGSGTDFTLTISSLQPEDFATYYCQQFNSYPYTFGCGTKLEIKAAEPKSSDKTHTCPPCPAPEAAGGPSVFLFPPKPKDTLMISRTPEVTCVVVSVSHEDPEVKFNWYVDGVEVHNAKTKPREEQYNSTYRVVSVLTVLHQDWLNGKEYKCKVSNKALPAPIEKTISKAKGQPREPQVYVLPPSRDELTKNQVSLLCLVKGFYPSDIAVEWESNGQPENNYLTWPPVLDSDGSFFLYSKLTVDKSRWQQGNVFSCSVMHEALHNHYTQKSLSLSPGK

SEQ ID NO: 77 - DNA, 1545 bp, Artificial Sequence; identical to SEQ ID NO: 53
  Description of Artificial Sequence: Synthetic polynucleotide

SEQ ID NO: 78 - protein, 512 aa, Artificial Sequence; identical to SEQ ID NO: 54
  Description of Artificial Sequence: Synthetic polypeptide

SEQ ID NO: 79 - DNA, 1527 bp, Artificial Sequence
  Description of Artificial Sequence: Synthetic polynucleotide
gaattcgccaccatggccgtcatggcacctagaacactggtcctgctgctgtccggggcactggcactgactcagacttgggctggggctattcagctgacccagagccctagctccctgtctgcaagtgtcggcgaccgggtgaccatcacatgcagagcctcccaggggatttctagtgctctggcatggtaccagcagaagccaggcaaagcccccaagctgctgatctatgatgcttcaagcctggaaagcggggtgccatcccggttctcaggaagcggctccggaaccgactttactctgaccatttcctctctgcagcccgaggatttcgcaacatactattgccagcagttcaacagctacccttatacatttggacagggcactaaactggaaatcaagggcggaggaggctccggaggaggagggtctggaggaggaggaagtgaggtccagctggtgcagtccggggctgaggtgaagaaaccaggagaatctctgaaaatcagttgtaaggggtccggatactctttcagttcaagctggattggatgggtgcgccagatgccaggcaagggactggagtggatgggcatcatctaccctgacgattctgacacaagatattctccaagttttcagggccaagtgactatctcagctgataaaagcattaggaccgcatatctgcagtggtcctctctgaaggcaagcgacacagccatgtactattgcgcccgacacgtcactatgatctggggcgtgatcattgatttctggggacagggcaccctggtcacagtgagttcagccgctgaacccaaaagctccgacaagacacatacttgccccccttgtccagctccagaggcagcaggaggaccatctgtgttcctgtttccacccaagcctaaagataccctgatgattagcaggactcctgaagtcacctgtgtggtcgtgtcagtgagccacgaggacccagaagtcaagtttaactggtacgtggatggcgtcgaggtgcataatgccaagacaaaacctagggaggaacagtacaattcaacctatcgcgtcgtgagcgtcctgacagtgctgcaccaggactggctgaacgggaaggagtataagtgcaaagtgagcaacaaggccctgcctgctccaatcgagaagacaatttccaaggctaaaggccagccccgagaacctcaggtctacgtgctgcctccatctcgggacgagctgactaaaaaccaggtcagcctgctgtgtctggtgaaggggttctatccaagtgatatcgcagtggagtgggaatccaatggacagcccgaaaacaattacctgacttggccccctgtgctggacagtgatggatcattctttctgtattccaaactgaccgtggataagtctcggtggcagcagggcaacgtcttttcctgttctgtgatgcatgaggccctgcacaatcattacacccagaaaagtctgtcactgagccccggcaagtgaggatcc

SEQ ID NO: 80 - protein, 506 aa, Artificial Sequence
  Description of Artificial Sequence: Synthetic polypeptide
EFATMAVMAPRTLVLLLSGALALTQTWAGAIQLTQSPSSLSASVGDRVTITCRASQGISSALAWYQQKPGKAPKLLIYDASSLESGVPSRFSGSGSGTDFTLTISSLQPEDFATYYCQQFNSYPYTFGQGTKLEIKGGGGSGGGGSGGGGSEVQLVQSGAEVKKPGESLKISCKGSGYSFSSSWIGWVRQMPGKGLEWMGIIYPDDSDTRYSPSFQGQVTISADKSIRTAYLQWSSLKASDTAMYYCARHVTMIWGVIIDFWGQGTLVTVSSAAEPKSSDKTHTCPPCPAPEAAGGPSVFLFPPKPKDTLMISRTPEVTCVVVSVSHEDPEVKFNWYVDGVEVHNAKTKPREEQYNSTYRVVSVLTVLHQDWLNGKEYKCKVSNKALPAPIEKTISKAKGQPREPQVYVLPPSRDELTKNQVSLLCLVKGFYPSDIAVEWESNGQPENNYLTWPPVLDSDGSFFLYSKLTVDKSRWQQGNVFSCSVMHEALHNHYTQKSLSLSPGK

SEQ ID NO: 81 - DNA, 1545 bp, Artificial Sequence; identical to SEQ ID NO: 57
  Description of Artificial Sequence: Synthetic polynucleotide

SEQ ID NO: 82 - protein, 512 aa, Artificial Sequence; identical to SEQ ID NO: 58
  Description of Artificial Sequence: Synthetic polypeptide

SEQ ID NO: 83 - DNA, 1527 bp, Artificial Sequence
  Description of Artificial Sequence: Synthetic polynucleotide
gaattcgccaccatggccgtgatggctcctcgcaccctggtcctgctgctgagcggggcactggcactgacacagacttgggctggggctattcagctgacccagagccctagctccctgtctgcaagtgtcggggaccgggtgaccatcacatgcagagcctcccagggaatttctagtgctctggcatggtaccagcagaagccaggaaaagcccccaagctgctgatctatgatgcttcaagcctggaaagcggcgtgccatcccggttctcaggaagcggctccggaaccgactttactctgaccatttcctctctgcagcccgaggatttcgcaacatactattgccagcagttcaacagctacccttatacatttggatgtggcactaaactggaaatcaagggcggaggaggctccggaggaggagggtctggaggaggaggaagtgaggtccagctggtgcagtccggagctgaggtgaagaaaccaggcgaatctctgaaaatcagttgcaaggggtccggatactctttcagttcaagctggattgggtgggtgcgccagatgcccggaaagtgtctggagtggatgggcatcatctaccctgacgattctgacacaagatattctccaagttttcagggccaagtgactatctcagctgataaaagcattaggaccgcatatctgcagtggtcctctctgaaggcaagcgacacagccatgtactattgcgcccgacacgtcactatgatctggggcgtgatcattgatttctggggccaggggaccctggtcacagtgagttcagccgctgaacccaaaagctccgacaagacacatacttgccccccttgtccagctccagaggcagcaggaggaccatctgtgttcctgtttccacccaagcctaaagataccctgatgattagcaggactcctgaagtcacctgtgtggtcgtgtcagtgagccacgaggacccagaagtcaagtttaactggtacgtggatggcgtcgaggtgcataatgccaagacaaaacctagggaggaacagtacaattcaacctatcgcgtcgtgagcgtcctgacagtgctgcaccaggactggctgaacggcaaggagtataagtgcaaagtgagcaacaaggccctgcctgctccaatcgagaagacaatttccaaggctaaagggcagccccgagaacctcaggtctacgtgctgcctccatctcgggacgagctgactaaaaaccaggtcagcctgctgtgtctggtgaagggcttctatccaagtgatatcgcagtggagtgggaatccaatgggcagcccgaaaacaattacctgacttggccccctgtgctggacagtgatgggtcattctttctgtattccaaactgaccgtggataagtctcggtggcagcagggaaacgtcttttcctgttctgtgatgcatgaggccctgcacaatcattacacccagaaaagtctgtcactgagccccggcaagtgaggatcc

SEQ ID NO: 84 - protein, 506 aa, Artificial Sequence
  Description of Artificial Sequence: Synthetic polypeptide
EFATMAVMAPRTLVLLLSGALALTQTWAGAIQLTQSPSSLSASVGDRVTITCRASQGISSALAWYQQKPGKAPKLLIYDASSLESGVPSRFSGSGSGTDFTLTISSLQPEDFATYYCQQFNSYPYTFGCGTKLEIKGGGGSGGGGSGGGGSEVQLVQSGAEVKKPGESLKISCKGSGYSFSSSWIGWVRQMPGKCLEWMGIIYPDDSDTRYSPSFQGQVTISADKSIRTAYLQWSSLKASDTAMYYCARHVTMIWGVIIDFWGQGTLVTVSSAAEPKSSDKTHTCPPCPAPEAAGGPSVFLFPPKPKDTLMISRTPEVTCVVVSVSHEDPEVKFNWYVDGVEVHNAKTKPREEQYNSTYRVVSVLTVLHQDWLNGKEYKCKVSNKALPAPIEKTISKAKGQPREPQVYVLPPSRDELTKNQVSLLCLVKGFYPSDIAVEWESNGQPENNYLTWPPVLDSDGSFFLYSKLTVDKSRWQQGNVFSCSVMHEALHNHYTQKSLSLSPGK

SEQ ID NO: 85 - DNA, 1548 bp, Artificial Sequence
  Description of Artificial Sequence: Synthetic polynucleotide
gaattcgccaccatggctgtgatggctcctagaaccctggtcctgctgctgtccggggcactggcactgactcagacttgggctggggatattcagctgacacagagtcctgcttcactggcagtgagcctgggacagcgagcaactatctcctgcaaagctagtcagtcagtggactatgatggcgactcctatctgaactggtaccagcagatcccagggcagccccctaagctgctgatctacgacgcctcaaatctggtgagcggcatcccaccacgattcagcggcagcggctctgggactgattttaccctgaacattcacccagtcgagaaggtggacgccgctacctaccattgccagcagtctaccgaggacccctggacattcggcgggggaactaaactggaaatcaagggaggaggaggcagtggcggaggagggtcaggaggaggaggaagccaggtgcagctgcagcagagcggagcagagctggtcagaccaggaagctccgtgaaaatttcctgtaaggcatctggctatgccttttctagttactggatgaattgggtgaagcagaggccaggacagggcctggaatggatcgggcagatttggcccggggatggagacaccaactataatggaaagttcaaaggcaaggctacactgactgcagacgagtcaagctccacagcttatatgcagctgtctagtctggccagcgaggattccgctgtgtacttttgcgcacggagagaaaccacaactgtgggcaggtactattacgcaatggactactggggccaggggaccacagtcaccgtgtcaagcgcagccgaacccaaatcctctgataagacccacacatgccctccatgtccagcacctgagctgctgggaggaccaagcgtgttcctgtttccacctaaacctaaggacacactgatgatctctcggacacccgaagtcacttgtgtggtcgtggatgtgagccacgaggaccctgaagtcaaattcaactggtacgtggatggcgtcgaggtgcataatgccaaaactaagcctagggaggaacagtataactccacttaccgcgtcgtgtctgtcctgaccgtgctgcatcaggactggctgaacggaaaggagtacaaatgcaaggtgagcaacaaggccctgccagctcccatcgagaagacaatttccaaagctaagggccagcctcgagaaccacaggtctatgtgtacccacccagccgggacgagctgaccaaaaaccaggtctccctgacatgtctggtgaagggattttatccttctgatattgccgtggagtgggaaagtaatggccagccagaaaacaattacaagactacccctccagtgctggattctgacgggagtttcgcactggtcagtaaactgactgtggataagtcacggtggcagcagggaaacgtctttagttgttcagtgatgcacgaggccctgcacaatcattacacccagaaaagcctgtccctgtctcccggcaagtgaggatcc

SEQ ID NO: 86 - DNA, 1527 bp, Artificial Sequence
  Description of Artificial Sequence: Synthetic polynucleotide
gaattcgccaccatggctgtgatggctcctagaacactggtcctgctgctgtccggggcactggcactgactcagacttgggctggggatattaagctgcagcagagcggagctgagctggcacgaccaggagccagtgtgaaaatgtcatgcaagaccagcggctacacattcactcggtatacaatgcactgggtgaagcagagaccaggacagggactggaatggatcggatatattaacccttcccgaggctacacaaactacaaccagaagtttaaagacaaggccactctgaccacagataagagctcctctaccgcttacatgcagctgagttcactgacaagtgaggactcagctgtgtactattgcgcaaggtactatgacgatcattactgtctggattattggggacagggcactaccctgactgtcagctccgtggaaggagggagcggaggctccggaggatctggcgggagtggaggcgtggacgatatccagctgacccagtccccagcaattatgtccgcctctcccggcgagaaagtcaccatgacatgccgcgcttctagttcagtgagctacatgaactggtatcagcagaaatcaggcactagccccaagagatggatctacgacacctccaaggtcgcatctggggtgccttataggttcagtgggtcaggaagcggcacctcctactctctgacaattagctccatggaggcagaagatgccgctacctactattgtcagcagtggtctagtaatccactgacttttggggccggaaccaaactggagctgaaggcagccgaacccaaatcaagcgacaagactcacacctgccccccttgtccagcacccgaactgctggggggacctagcgtgttcctgtttccacccaaaccaaaggatacactgatgatcagccggacacctgaggtcacttgcgtggtcgtggacgtgagccacgaggaccccgaagtcaagttcaactggtacgtggacggcgtcgaagtgcataatgctaaaaccaagcctagggaggaacagtacaatagtacatatagagtcgtgtcagtgctgaccgtcctgcatcaggattggctgaacgggaaggagtacaaatgcaaggtgtccaacaaggccctgcctgctccaatcgagaagaccatttctaaagccaagggccagccccgagaacctcaggtctatgtgctgcctccatcccgggacgagctgacaaaaaaccaggtctctctgctgtgtctggtgaaggggttctacccatctgatattgctgtggagtgggaaagtaatggacagcccgagaacaattatctgacatggccccctgtgctggactccgatggatctttctttctgtacagcaaactgactgtggacaagtccagatggcagcagggcaacgtctttagttgttcagtgatgcacgaggccctgcacaatcattacacccagaaaagcctgtccctgtctcccggcaagtgaggatcc

SEQ ID NO: 87 - protein, 513 aa, Artificial Sequence
  Description of Artificial Sequence: Synthetic polypeptide
EFATMAVMAPRTLVLLLSGALALTQTWAGDIQLTQSPASLAVSLGQRATISCKASQSVDYDGDSYLNWYQQIPGQPPKLLIYDASNLVSGIPPRFSGSGSGTDFTLNIHPVEKVDAATYHCQQSTEDPWTFGGGTKLEIKGGGGSGGGGSGGGGSQVQLQQSGAELVRPGSSVKISCKASGYAFSSYWMNWVKQRPGQGLEWIGQIWPGDGDTNYNGKFKGKATLTADESSSTAYMQLSSLASEDSAVYFCARRETTTVGRYYYAMDYWGQGTTVTVSSAAEPKSSDKTHTCPPCPAPELLGGPSVFLFPPKPKDTLMISRTPEVTCVVVDVSHEDPEVKFNWYVDGVEVHNAKTKPREEQYNSTYRVVSVLTVLHQDWLNGKEYKCKVSNKALPAPIEKTISKAKGQPREPQVYVYPPSRDELTKNQVSLTCLVKGFYPSDIAVEWESNGQPENNYKTTPPVLDSDGSFALVSKLTVDKSRWQQGNVFSCSVMHEALHNHYTQKSLSLSPGK

SEQ ID NO: 88 - protein, 506 aa, Artificial Sequence
  Description of Artificial Sequence: Synthetic polypeptide
EFATMAVMAPRTLVLLLSGALALTQTWAGDIKLQQSGAELARPGASVKMSCKTSGYTFTRYTMHWVKQRPGQGLEWIGYINPSRGYTNYNQKFKDKATLTTDKSSSTAYMQLSSLTSEDSAVYYCARYYDDHYCLDYWGQGTTLTVSSVEGGSGGSGGSGGSGGVDDIQLTQSPAIMSASPGEKVTMTCRASSSVSYMNWYQQKSGTSPKRWIYDTSKVASGVPYRFSGSGSGTSYSLTISSMEAEDAATYYCQQWSSNPLTFGAGTKLELKAAEPKSSDKTHTCPPCPAPELLGGPSVFLFPPKPKDTLMISRTPEVTCVVVDVSHEDPEVKFNWYVDGVEVHNAKTKPREEQYNSTYRVVSVLTVLHQDWLNGKEYKCKVSNKALPAPIEKTISKAKGQPREPQVYVLPPSRDELTKNQVSLLCLVKGFYPSDIAVEWESNGQPENNYLTWPPVLDSDGSFFLYSKLTVDKSRWQQGNVFSCSVMHEALHNHYTQKSLSLSPGK

SEQ ID NO: 89 - DNA, 1608 bp, Artificial Sequence
  Description of Artificial Sequence: Synthetic polynucleotide
gaattcgcgaccatggccgtgatggcacctagaacactggtcctgctgctgagcggggcactggcactgacacagacttgggctggagatattcagctgacacagtctccagctagtctggcagtgagcctgggccagcgggctactatcagctgcaaggcaagccagtccgtcgactacgatggggacagctatctgaactggtaccagcagatccccggacagccccctaaactgctgatctacgacgcctcaaatctggtgagcggcatcccacccagattctctggaagtggctcagggaccgattttacactgaacattcaccccgtggagaaggtcgacgccgctacctaccattgccagcagtccactgaggacccctggaccttcggaggaggaacaaagctggaaatcaaaggcggaggaggcagtggaggaggagggagcggaggaggaggaagccaggtgcagctgcagcagagcggagcagaactggtgagacctggaagctccgtcaagatttcctgtaaagcatctggctatgccttttctagttactggatgaattgggtgaagcagaggccaggacagggactggagtggatcggacagatttggcctggggatggagacaccaactacaatggaaagttcaaaggcaaggctaccctgacagcagacgaatcaagctccacagcttacatgcagctgtctagtctggcatcagaggatagcgccgtgtatttttgcgctcggagagaaaccacaactgtcggccgctactattacgccatggactactggggccaggggaccacagtgacagtctcaagcggcgggggaggctccgatatcaagctgcagcagtctggagcagagctggctcgaccaggagccagtgtgaagatgtcatgtaaaaccagcggctatactttcaccaggtacacaatgcactgggtgaaacagcgcccaggacagggcctggaatggatcggatacattaacccctccaggggctataccaactacaatcagaagttcaaggataaagccactctgactaccgacaagtcctctagtaccgcttatatgcagctgtcaagcctgacatccgaggactctgcagtgtattactgcgcccgctattacgacgatcattattgtctggattactgggggcagggaacaactctgactgtgtcctctgtcgaagggggaagtggagggtcaggaggcagcggaggcagcggaggggtggacgatatccagctgacccagtcccctgccattatgagcgcttccccaggcgagaaggtgacaatgacttgcagggctagttcaagcgtctcttatatgaattggtatcagcagaagtctggcactagtcctaaacgatggatctatgacacctccaaagtggcatctggggtcccataccggttctctggcagtgggtcaggaactagctattccctgaccatttcctctatggaggcagaagatgcagccacctattactgtcagcagtggagttcaaatcccctgacatttggcgccgggactaagctggagctgaaacaccatcaccatcaccattgaggatcc

SEQ ID NO: 90 - protein, 533 aa, Artificial Sequence
  Description of Artificial Sequence: Synthetic polypeptide
EFATMAVMAPRTLVLLLSGALALTQTWAGDIQLTQSPASLAVSLGQRATISCKASQSVDYDGDSYLNWYQQIPGQPPKLLIYDASNLVSGIPPRFSGSGSGTDFTLNIHPVEKVDAATYHCQQSTEDPWTFGGGTKLEIKGGGGSGGGGSGGGGSQVQLQQSGAELVRPGSSVKISCKASGYAFSSYWMNWVKQRPGQGLEWIGQIWPGDGDTNYNGKFKGKATLTADESSSTAYMQLSSLASEDSAVYFCARRETTTVGRYYYAMDYWGQGTTVTVSSGGGGSDIKLQQSGAELARPGASVKMSCKTSGYTFTRYTMHWVKQRPGQGLEWIGYINPSRGYTNYNQKFKDKATLTTDKSSSTAYMQLSSLTSEDSAVYYCARYYDDHYCLDYWGQGTTLTVSSVEGGSGGSGGSGGSGGVDDIQLTQSPAIMSASPGEKVTMTCRASSSVSYMNWYQQKSGTSPKRWIYDTSKVASGVPYRFSGSGSGTSYSLTISSMEAEDAATYYCQQWSSNPLTFGAGTKLELKHHHHHH

SEQ ID NO: 91 - DNA, 1548 bp, Artificial Sequence
  Description of Artificial Sequence: Synthetic polynucleotide
gaattcgccaccatggccgtgatggcaccccgcaccctggtcctgctgctgtccggggcactggcactgactcagacttgggctggcgatattcagctgacacagagtcctgcatcactggctgtgagcctgggacagcgagcaactatctcctgcaaagccagtcagtcagtggactatgatggcgactcctatctgaactggtaccagcagatcccagggcagccccctaagctgctgatctacgacgcctcaaatctggtgagcggcatcccaccacgattcagcggcagcggctctgggactgattttaccctgaacattcacccagtcgagaaggtggacgccgctacctaccattgccagcagtctaccgaggacccctggacattcggcgggggaactaaactggaaatcaagggaggaggaggcagtggcggaggagggtcaggaggaggaggaagccaggtgcagctgcagcagagcggagcagagctggtcagaccaggaagctccgtgaaaatttcctgtaaggcttctggctatgcattttctagttactggatgaattgggtgaagcagaggccaggacagggcctggaatggatcgggcagatttggcccggggatggagacaccaactataatggaaagttcaaaggcaaggccacactgactgctgacgagtcaagctccacagcctatatgcagctgtctagtctggcaagcgaggattccgccgtgtacttttgcgctcggagagaaaccacaactgtgggcaggtactattacgctatggactactggggccaggggaccacagtcaccgtgtcaagcgcagccgaacccaaatcctctgataagacccacacatgccctccatgtccagctcctgaggctgcaggaggaccaagcgtgttcctgtttccccctaaacctaaggacacactgatgatctctcggacacccgaagtcacttgtgtggtcgtggatgtgagccacgaggaccctgaagtcaaattcaactggtacgtggatggcgtcgaggtgcataatgccaaaactaagcctagggaggaacagtataactccacttaccgcgtcgtgtctgtcctgaccgtgctgcatcaggactggctgaacggaaaggagtacaaatgcaaggtgagcaacaaggcactgccagcccccatcgagaagacaatttccaaagcaaagggccagcctcgagaaccacaggtctatgtgtacccacccagccgggacgagctgaccaaaaaccaggtctccctgacatgtctggtgaagggattttatccttctgatattgccgtggagtgggaaagtaatggccagccagaaaacaattacaagactacccctccagtgctggattctgacgggagtttcgctctggtcagtaaactgactgtggataagtcacggtggcagcagggaaacgtctttagttgttcagtgatgcacgaggcactgcacaatcattacacccagaaaagcctgtccctgtctcccggcaagtgaggatcc

SEQ ID NO: 92 - DNA, 1527 bp, Artificial Sequence
  Description of Artificial Sequence: Synthetic polynucleotide
gaattcgccaccatggccgtcatggcacctagaaccctggtcctgctgctgagcggggcactggcactgacacagacttgggccggagacatcaaactgcagcagagcggagcagagctggctcgaccaggagccagtgtgaaaatgtcatgcaagaccagcggctacacattcactcggtatacaatgcactgggtgaagcagagaccaggacagggactggaatggatcggatatattaacccttcccgaggctacacaaactacaaccagaagtttaaagacaaggcaactctgaccacagataagagctcctctaccgcctacatgcagctgagttcactgacaagtgaggactcagccgtgtactattgcgctaggtactatgacgatcattactgtctggattattggggacagggcactaccctgactgtcagctccgtggaaggagggagcggaggctccggaggatctggcgggagtggaggcgtggacgatatccagctgacccagtccccagctattatgtccgcatctcccggcgagaaagtcaccatgacatgccgcgcctctagttcagtgagctacatgaactggtatcagcagaaatcaggcactagccccaagagatggatctacgacacctccaaggtcgcttctggggtgccttataggttcagtgggtcaggaagcggcacctcctactctctgacaattagctccatggaggctgaagatgccgctacctactattgtcagcagtggtctagtaatccactgacttttggggcaggaaccaaactggagctgaaggcagccgaacccaaatcaagcgacaagactcacacctgcccaccttgtccagcaccagaagctgcaggaggacctagcgtgttcctgtttccacccaaaccaaaggatacactgatgatcagccggacacctgaggtcacttgcgtggtcgtggacgtgagccacgaggaccccgaagtcaagttcaactggtacgtggacggcgtcgaagtgcataatgccaaaaccaagcctagggaggaacagtacaatagtacatatagagtcgtgtcagtgctgaccgtcctgcatcaggattggctgaacgggaaggagtacaaatgcaaggtgtccaacaaggcactgcctgccccaatcgagaagaccatttctaaagcaaagggccagccccgagaacctcaggtctatgtgctgcctccatcccgggacgagctgacaaaaaaccaggtctctctgctgtgtctggtgaaggggttctacccatctgatattgctgtggagtgggaaagtaatggacagcccgagaacaattatctgacatggccccctgtgctggactccgatggatctttctttctgtacagcaaactgactgtggacaagtccagatggcagcagggcaacgtctttagttgttcagtgatgcacgaggccctgcacaatcattacacccagaaaagcctgtccctgtctcccggcaagtgaggatcc

SEQ ID NO: 93 - protein, 513 aa, Artificial Sequence
  Description of Artificial Sequence: Synthetic polypeptide
EFATMAVMAPRTLVLLLSGALALTQTWAGDIQLTQSPASLAVSLGQRATISCKASQSVDYDGDSYLNWYQQIPGQPPKLLIYDASNLVSGIPPRFSGSGSGTDFTLNIHPVEKVDAATYHCQQSTEDPWTFGGGTKLEIKGGGGSGGGGSGGGGSQVQLQQSGAELVRPGSSVKISCKASGYAFSSYWMNWVKQRPGQGLEWIGQIWPGDGDTNYNGKFKGKATLTADESSSTAYMQLSSLASEDSAVYFCARRETTTVGRYYYAMDYWGQGTTVTVSSAAEPKSSDKTHTCPPCPAPEAAGGPSVFLFPPKPKDTLMISRTPEVTCVVVDVSHEDPEVKFNWYVDGVEVHNAKTKPREEQYNSTYRVVSVLTVLHQDWLNGKEYKCKVSNKALPAPIEKTISKAKGQPREPQVYVYPPSRDELTKNQVSLTCLVKGFYPSDIAVEWESNGQPENNYKTTPPVLDSDGSFALVSKLTVDKSRWQQGNVFSCSVMHEALHNHYTQKSLSLSPGK

SEQ ID NO: 94 - protein, 506 aa, Artificial Sequence
  Description of Artificial Sequence: Synthetic polypeptide
EFATMAVMAPRTLVLLLSGALALTQTWAGDIKLQQSGAELARPGASVKMSCKTSGYTFTRYTMHWVKQRPGQGLEWIGYINPSRGYTNYNQKFKDKATLTTDKSSSTAYMQLSSLTSEDSAVYYCARYYDDHYCLDYWGQGTTLTVSSVEGGSGGSGGSGGSGGVDDIQLTQSPAIMSASPGEKVTMTCRASSSVSYMNWYQQKSGTSPKRWIYDTSKVASGVPYRFSGSGSGTSYSLTISSMEAEDAATYYCQQWSSNPLTFGAGTKLELKAAEPKSSDKTHTCPPCPAPEAAGGPSVFLFPPKPKDTLMISRTPEVTCVVVDVSHEDPEVKFNWYVDGVEVHNAKTKPREEQYNSTYRVVSVLTVLHQDWLNGKEYKCKVSNKALPAPIEKTISKAKGQPREPQVYVLPPSRDELTKNQVSLLCLVKGFYPSDIAVEWESNGQPENNYLTWPPVLDSDGSFFLYSKLTVDKSRWQQGNVFSCSVMHEALHNHYTQKSLSLSPGK

SEQ ID NO: 95 - DNA, 1548 bp, Artificial Sequence
  Description of Artificial Sequence: Synthetic polynucleotide
gaattcgccaccatggctgtgatggcacctagaaccctggtcctgctgctgagcggggcactggcactgacccagacttgggccggagacattcagctgacacagagtcctgcttcactggcagtgagcctgggacagcgagcaactatctcctgcaaagctagtcagtcagtggactatgatggcgactcctatctgaactggtaccagcagatcccagggcagccccctaagctgctgatctacgacgcttcaaatctggtgagcggcatcccaccacgattcagcggcagcggctctgggactgattttaccctgaacattcacccagtcgagaaggtggacgccgctacctaccattgccagcagtctaccgaggacccctggacattcggcgggggaactaaactggaaatcaagggaggaggaggcagtggcggaggagggtcaggaggaggaggaagccaggtgcagctgcagcagagcggagcagagctggtcagaccaggaagctccgtgaaaatttcctgtaaggcatctggctatgccttttctagttactggatgaattgggtgaagcagaggccaggacagggcctggaatggatcgggcagatttggcccggggatggagacaccaactataatggaaagttcaaaggcaaggctacactgactgcagacgagtcaagctccacagcctatatgcagctgtctagtctggccagcgaggattccgctgtgtacttttgcgcacggagagaaaccacaactgtgggcaggtactattacgctatggactactggggccaggggaccacagtcaccgtgtcaagcgcagccgaacccaaatcctctgataagacccacacatgccctccatgtccagcacctgagctgctgggaggaccaagcgtgttcctgtttccacctaaacctaaggacacactgatgatctctcggacacccgaagtcacttgtgtggtcgtggatgtgagccacgaggaccctgaagtcaaattcaactggtacgtggatggcgtcgaggtgcataatgcaaaaactaagcctagggaggaacagtatgcctccacttaccgcgtcgtgtctgtcctgaccgtgctgcatcaggactggctgaacggaaaggagtacaaatgcaaggtgagcaacaaggccctgccagctcccatcgagaagacaatttccaaagcaaagggccagcctcgagaaccacaggtctatgtgtacccacccagccgggacgagctgaccaaaaaccaggtctccctgacatgtctggtgaagggattttatccttctgatattgccgtggagtgggaaagtaatggccagccagaaaacaattacaagactacccctccagtgctggattctgacgggagtttcgctctggtcagtaaactgactgtggataagtcacggtggcagcagggaaacgtctttagttgttcagtgatgcacgaggcactgcacaatcattacacccagaaaagcctgtccctgtctcccggcaagtgaggatcc

SEQ ID NO: 96 - DNA, 1527 bp, Artificial Sequence
  Description of Artificial Sequence: Synthetic polynucleotide
gaattcgccaccatggccgtcatggcacctagaaccctggtcctgctgctgagcggggcactggcactgacacagacttgggctggagacatcaaactgcagcagagcggagctgagctggcacgaccaggagccagtgtgaaaatgtcatgcaagaccagcggctacacattcactcggtatacaatgcactgggtgaagcagagaccaggacagggactggaatggatcggatatattaacccttcccgaggctacacaaactacaaccagaagtttaaagacaaggcaactctgaccacagataagagctcctctaccgcctacatgcagctgagttcactgacaagtgaggactcagctgtgtactattgcgcaaggtactatgacgatcattactgtctggattattggggacagggcactaccctgactgtcagctccgtggaaggagggagcggaggctccggaggatctggcgggagtggaggcgtggacgatatccagctgacccagtccccagcaattatgtccgcctctcccggcgagaaagtcaccatgacatgccgcgcctctagttcagtgagctacatgaactggtatcagcagaaatcaggcactagccccaagagatggatctacgacacctccaaggtcgcttctggggtgccttataggttcagtgggtcaggaagcggcacctcctactctctgacaattagctccatggaggctgaagatgccgctacctactattgtcagcagtggtctagtaatccactgacttttggggcaggaaccaaactggagctgaaggcagccgaacccaaatcaagcgacaagactcacacctgcccaccttgtccagcaccagaactgctgggaggacctagcgtgttcctgtttccacccaaaccaaaggatacactgatgatcagccggacacctgaggtcacttgcgtggtcgtggacgtgagccacgaggaccccgaagtcaagttcaactggtacgtggacggcgtcgaagtgcataatgccaaaaccaagcctagggaggaacagtacgctagtacatatagagtcgtgtcagtgctgaccgtcctgcatcaggattggctgaacgggaaggagtacaaatgcaaggtgtccaacaaggccctgcctgctccaatcgagaagaccatttctaaagcaaagggccagccccgagaacctcaggtctatgtgctgcctccatcccgggacgagctgacaaaaaaccaggtctctctgctgtgtctggtgaaggggttctacccatctgatattgctgtggagtgggaaagtaatggacagcccgagaacaattatctgacatggccccctgtgctggactccgatggatctttctttctgtacagcaaactgactgtggacaagtccagatggcagcagggcaacgtctttagttgttcagtgatgcacgaggccctgcacaatcattacacccagaaaagcctgtccctgtctcccggcaagtgaggatcc

SEQ ID NO: 97 - protein, 513 aa, Artificial Sequence
  Description of Artificial Sequence: Synthetic polypeptide
EFATMAVMAPRTLVLLLSGALALTQTWAGDIQLTQSPASLAVSLGQRATISCKASQSVDYDGDSYLNWYQQIPGQPPKLLIYDASNLVSGIPPRFSGSGSGTDFTLNIHPVEKVDAATYHCQQSTEDPWTFGGGTKLEIKGGGGSGGGGSGGGGSQVQLQQSGAELVRPGSSVKISCKASGYAFSSYWMNWVKQRPGQGLEWIGQIWPGDGDTNYNGKFKGKATLTADESSSTAYMQLSSLASEDSAVYFCARRETTTVGRYYYAMDYWGQGTTVTVSSAAEPKSSDKTHTCPPCPAPELLGGPSVFLFPPKPKDTLMISRTPEVTCVVVDVSHEDPEVKFNWYVDGVEVHNAKTKPREEQYASTYRVVSVLTVLHQDWLNGKEYKCKVSNKALPAPIEKTISKAKGQPREPQVYVYPPSRDELTKNQVSLTCLVKGFYPSDIAVEWESNGQPENNYKTTPPVLDSDGSFALVSKLTVDKSRWQQGNVFSCSVMHEALHNHYTQKSLSLSPGK

SEQ ID NO: 98 - protein, 506 aa, Artificial Sequence
  Description of Artificial Sequence: Synthetic polypeptide
EFATMAVMAPRTLVLLLSGALALTQTWAGDIKLQQSGAELARPGASVKMSCKTSGYTFTRYTMHWVKQRPGQGLEWIGYINPSRGYTNYNQKFKDKATLTTDKSSSTAYMQLSSLTSEDSAVYYCARYYDDHYCLDYWGQGTTLTVSSVEGGSGGSGGSGGSGGVDDIQLTQSPAIMSASPGEKVTMTCRASSSVSYMNWYQQKSGTSPKRWIYDTSKVASGVPYRFSGSGSGTSYSLTISSMEAEDAATYYCQQWSSNPLTFGAGTKLELKAAEPKSSDKTHTCPPCPAPELLGGPSVFLFPPKPKDTLMISRTPEVTCVVVDVSHEDPEVKFNWYVDGVEVHNAKTKPREEQYASTYRVVSVLTVLHQDWLNGKEYKCKVSNKALPAPIEKTISKAKGQPREPQVYVLPPSRDELTKNQVSLLCLVKGFYPSDIAVEWESNGQPENNYLTWPPVLDSDGSFFLYSKLTVDKSRWQQGNVFSCSVMHEALHNHYTQKSLSLSPGK

SEQ ID NO: 99 - DNA, 1548 bp, Artificial Sequence; identical to SEQ ID NO: 85
  Description of Artificial Sequence: Synthetic polynucleotide

SEQ ID NO: 100 - DNA, 1518 bp, Artificial Sequence
  Description of Artificial Sequence: Synthetic polynucleotide
gaattcgccaccatggccgtgatggcaccccgaacactggtcctgctgctgagcggggcactggcactgacacagacttgggctggacagatcgtcctgacacagagcccagcaatcatgtcagccagccccggcgagaaagtcacaatgacttgctcagcaagctcctctgtgagctacatgaactggtatcagcagaaaagcggaacctcccccaagagatggatctacgacacatccaagctggcttctggagtgcctgcacacttcaggggcagcggctctgggaccagttattcactgacaatttccggcatggaggctgaagatgccgctacctactattgccagcagtggagttcaaacccattcacttttggatctggcaccaagctggaaattaatggcggaggaggctccggaggaggagggtctggaggaggaggaagtcaggtgcagctgcagcagagcggagctgagctggcacgaccaggagcaagtgtgaaaatgtcctgtaaggccagcggctacaccttcacacggtataccatgcattgggtgaaacagagacccgggcagggactggaatggatcgggtacattaatccttcccgaggatacacaaactacaaccagaagtttaaagacaaggctactctgaccacagataagagctcctctaccgcatatatgcagctgagttcactgacatctgaggacagtgccgtgtactattgcgctaggtactatgacgatcactactccctggattattggggccaggggactaccctgacagtgagctccgcagccgaacctaaatctagtgacaagactcatacctgccccccttgtccagcaccagagctgctgggaggacctagcgtgttcctgtttccacccaaaccaaaggatactctgatgatctcccggacacctgaagtcacttgtgtggtcgtggacgtgtctcacgaggaccccgaagtcaagtttaactggtacgtggacggcgtcgaggtgcataatgccaaaaccaagcccagggaggaacagtacaactccacatatcgcgtcgtgtctgtcctgactgtgctgcaccaggattggctgaacggcaaggagtacaaatgcaaggtgagcaacaaggccctgcctgctccaatcgagaagacaattagcaaagccaaggggcagccccgagaacctcaggtctacgtgctgcctccatctcgggacgagctgactaaaaaccaggtcagtctgctgtgtctggtgaagggcttctatccaagcgatattgctgtggagtgggaatccaatgggcagcccgaaaacaattacctgacttggccccctgtcctggactcagatgggagcttctttctgtatagtaaactgaccgtggacaagtcacggtggcagcagggaaacgtctttagctgttccgtgatgcatgaggccctgcacaatcattacacccagaaatctctgagtctgtcacccggcaagtgaggatcc

SEQ ID NO: 101 - protein, 513 aa, Artificial Sequence; identical to SEQ ID NO: 87
  Description of Artificial Sequence: Synthetic polypeptide

SEQ ID NO: 102 - protein, 503 aa, Artificial Sequence
  Description of Artificial Sequence: Synthetic polypeptide
EFATMAVMAPRTLVLLLSGALALTQTWAGQIVLTQSPAIMSASPGEKVTMTCSASSSVSYMNWYQQKSGTSPKRWIYDTSKLASGVPAHFRGSGSGTSYSLTISGMEAEDAATYYCQQWSSNPFTFGSGTKLEINGGGGSGGGGSGGGGSQVQLQQSGAELARPGASVKMSCKASGYTFTRYTMHWVKQRPGQGLEWIGYINPSRGYTNYNQKFKDKATLTTDKSSSTAYMQLSSLTSEDSAVYYCARYYDDHYSLDYWGQGTTLTVSSAAEPKSSDKTHTCPPCPAPELLGGPSVFLFPPKPKDTLMISRTPEVTCVVVDVSHEDPEVKFNWYVDGVEVHNAKTKPREEQYNSTYRVVSVLTVLHQDWLNGKEYKCKVSNKALPAPIEKTISKAKGQPREPQVYVLPPSRDELTKNQVSLLCLVKGFYPSDIAVEWESNGQPENNYLTWPPVLDSDGSFFLYSKLTVDKSRWQQGNVFSCSVMHEALHNHYTQKSLSLSPGK

SEQ ID NO: 103 - DNA, 1548 bp, Artificial Sequence; identical to SEQ ID NO: 85
  Description of Artificial Sequence: Synthetic polynucleotide

SEQ ID NO: 104 - DNA, 1527 bp, Artificial Sequence
  Description of Artificial Sequence: Synthetic polynucleotide
gaattcgccaccatggccgtgatggctcctcggaccctggtgctgctgctgagtggggctctggctctgacacagacttgggccggacaggtgcagctgcagcagtctggagctgagctggcaaggcctggcgcatccgtgaaaatgtcttgcaaggccagtggctacaccttcacacggtatactatgcactgggtgaaacagagacccggacagggcctggaatggatcgggtacattaacccttcccgcggatacaccaactacaaccagaagtttaaagacaaggctactctgaccacagataagagctcctctaccgcatatatgcagctgagttcactgacaagcgaggactccgctgtgtactattgcgcacgctactatgacgatcattacagcctggattattgggggcagggaactaccctgacagtgagctccgccaaaacaactccaaagctggaggaaggcgagttctccgaagctcgagtcgacatcgtgctgactcagtctccagcaattatgtcagccagccccggggagaaagtcactatgacctgttccgcctctagttcagtgtcttacatgaattggtatcagcagaaatctggaactagtcccaagagatggatctacgacacctcaaagctggccagcggcgtgcctgctcactttaggggctccgggtctggaactagttattcactgaccattagcgggatggaggccgaagatgccgctacctactattgccagcagtggagctccaacccattcacatttggctccgggactaagctggagatcaatcgggcagccgaacccaaatctagtgacaagacacatacttgccccccttgtccagcaccagaactgctgggaggacctagcgtgttcctgtttccacccaaaccaaaggatacactgatgattagtagaacccctgaggtcacatgtgtggtcgtggacgtgtcccacgaggaccccgaagtcaagttcaactggtacgtggacggcgtcgaagtgcataatgccaaaaccaagcccagggaggaacagtacaacagtacctatcgcgtcgtgtcagtcctgacagtgctgcaccaggattggctgaacggaaaggagtacaaatgcaaggtgtctaacaaggccctgcctgctccaatcgagaagaccattagcaaagcaaagggccagccccgagaacctcaggtctacgtgctgcctccatcacgggacgagctgacaaaaaaccaggtcagcctgctgtgtctggtgaagggcttctatccatctgatatcgctgtggagtgggaaagtaatgggcagcccgagaacaattacctgacatggccccctgtcctggactcagatgggagcttctttctgtatagcaaactgactgtggataagtccaggtggcagcagggaaacgtctttagctgttccgtgatgcatgaagccctgcacaatcattacacccagaaatctctgagtctgtcacctggcaagtgaggatcc

SEQ ID NO: 105 - protein, 513 aa, Artificial Sequence; identical to SEQ ID NO: 87
  Description of Artificial Sequence: Synthetic polypeptide

SEQ ID NO: 106 - protein, 506 aa, Artificial Sequence
  Description of Artificial Sequence: Synthetic polypeptide
EFATMAVMAPRTLVLLLSGALALTQTWAGQVQLQQSGAELARPGASVKMSCKASGYTFTRYTMHWVKQRPGQGLEWIGYINPSRGYTNYNQKFKDKATLTTDKSSSTAYMQLSSLTSEDSAVYYCARYYDDHYSLDYWGQGTTLTVSSAKTTPKLEEGEFSEARVDIVLTQSPAIMSASPGEKVTMTCSASSSVSYMNWYQQKSGTSPKRWIYDTSKLASGVPAHFRGSGSGTSYSLTISGMEAEDAATYYCQQWSSNPFTFGSGTKLEINRAAEPKSSDKTHTCPPCPAPELLGGPSVFLFPPKPKDTLMISRTPEVTCVVVDVSHEDPEVKFNWYVDGVEVHNAKTKPREEQYNSTYRVVSVLTVLHQDWLNGKEYKCKVSNKALPAPIEKTISKAKGQPREPQVYVLPPSRDELTKNQVSLLCLVKGFYPSDIAVEWESNGQPENNYLTWPPVLDSDGSFFLYSKLTVDKSRWQQGNVFSCSVMHEALHNHYTQKSLSLSPGK

SEQ ID NO: 107 - DNA, 1548 bp, Artificial Sequence; identical to SEQ ID NO: 85
  Description of Artificial Sequence: Synthetic polynucleotide

SEQ ID NO: 108 - DNA, 1503 bp, Artificial Sequence
  Description of Artificial Sequence: Synthetic polynucleotide
gaattcgccaccatggccgtgatggctcctagaacactggtcctgctgctgagcggggcactggcactgacacagacttgggctgggcaggtccagctgcagcagagcggagctgagctggcacgacctggagcatccgtgaaaatgtcttgcaaggccagtggctacaccttcacacggtatacaatgcactgggtgaaacagagacccgggcagggactggaatggatcggctacattaacccttcccgagggtacactaactacaaccagaagtttaaagacaaggctactctgaccacagataagagctcctctaccgcatatatgcagctgagttcactgacaagcgaggactccgctgtgtactattgcgcacggtactatgacgatcattactccctggattattggggccaggggactaccctgacagtcagctccgccaaaacaactccaaagctgggcggggacatcgtgctgactcagtctccagcaattatgtcagccagccccggggagaaagtcactatgacctgttccgcttctagttcagtgtcttacatgaattggtatcagcagaaatctgggactagtcccaagagatggatctacgacacctcaaagctggccagcggagtgcctgctcacttcaggggcagcggctctgggactagttattcactgaccatttctggcatggaggccgaagatgccgctacctactattgccagcagtggagctccaacccattcacatttggaagcggcactaagctggagatcaatagggcagccgaacccaaatctagtgacaagacacatacttgcccaccttgtccagcaccagaactgctgggaggacctagcgtgttcctgtttccacccaaaccaaaggatacactgatgatttctcgcacccctgaggtcacatgtgtggtcgtggacgtcagtcacgaggaccccgaagtcaagtttaactggtacgtggacggcgtcgaagtgcataatgccaaaaccaagcccagggaggaacagtacaacagtacctatcgcgtcgtgtcagtcctgacagtgctgcaccaggattggctgaacggaaaggagtacaaatgcaaggtgagcaacaaggccctgcctgctccaatcgagaagactatttccaaagcaaagggccagccccgagaacctcaggtctacgtgctgcctccatcacgggacgagctgaccaaaaaccaggtctccctgctgtgtctggtgaagggattctatccatctgatatcgctgtggagtgggaaagtaatggccagcccgagaacaattacctgacctggccccctgtgctggactcagatggcagcttctttctgtatagcaaactgacagtggataagtccagatggcagcaggggaacgtctttagctgttccgtgatgcatgaagccctgcacaatcattacacccagaaatctctgagtctgtcacctggcaagtgaggatcc

SEQ ID NO: 109 - protein, 513 aa, Artificial Sequence; identical to SEQ ID NO: 87
  Description of Artificial Sequence: Synthetic polypeptide

SEQ ID NO: 110 - protein, 498 aa, Artificial Sequence
  Description of Artificial Sequence: Synthetic polypeptide
EFATMAVMAPRTLVLLLSGALALTQTWAGQVQLQQSGAELARPGASVKMSCKASGYTFTRYTMHWVKQRPGQGLEWIGYINPSRGYTNYNQKFKDKATLTTDKSSSTAYMQLSSLTSEDSAVYYCARYYDDHYSLDYWGQGTTLTVSSAKTTPKLGGDIVLTQSPAIMSASPGEKVTMTCSASSSVSYMNWYQQKSGTSPKRWIYDTSKLASGVPAHFRGSGSGTSYSLTISGMEAEDAATYYCQQWSSNPFTFGSGTKLEINRAAEPKSSDKTHTCPPCPAPELLGGPSVFLFPPKPKDTLMISRTPEVTCVVVDVSHEDPEVKFNWYVDGVEVHNAKTKPREEQYNSTYRVVSVLTVLHQDWLNGKEYKCKVSNKALPAPIEKTISKAKGQPREPQVYVLPPSRDELTKNQVSLLCLVKGFYPSDIAVEWESNGQPENNYLTWPPVLDSDGSFFLYSKLTVDKSRWQQGNVFSCSVMHEALHNHYTQKSLSLSPGK

SEQ ID NO: 111 - DNA, 1527 bp, Artificial Sequence
  Description of Artificial Sequence: Synthetic polynucleotide
gaattcgccaccatggccgtcatggcacctagaaccctggtcctgctgctgagcggggcactggcactgacacagacttgggctggagacatcaaactgcagcagagcggagctgagctggcacgaccaggagccagtgtgaaaatgtcatgcaagacaagcggctacaccttcacacggtatactatgcactgggtgaaacagagacccggccaggggctggaatggatcggatatattaacccttcccgaggctacaccaactataatcagaagtttaaagacaaggccaccctgaccacagataagagctcctctacagcttacatgcagctgagttcactgactagtgaggactcagctgtgtactattgcgcaaggtactatgacgatcattactgtctggattattggggacagggcactaccctgactgtcagctccgtggaaggagggagcggaggctccggaggatctggcgggagtggaggcgtggacgatatccagctgacccagtccccagcaattatgtccgcctctcccggcgagaaagtgactatgacctgccgcgcctctagttcagtgagctacatgaactggtatcagcagaaatcaggcaccagccccaagagatggatctacgacacatccaaggtcgcttctggggtgccttataggttcagtgggtcaggaagcggcacttcctactctctgaccattagctccatggaggcagaagatgccgctacatactattgtcagcagtggtctagtaatccactgacatttggggccggaactaaactggagctgaaggcagccgaacccaaatcaagcgacaagacacacacttgcccaccttgtccagcaccagaactgctgggaggacctagcgtgttcctgtttccacccaaaccaaaggatacactgatgatcagccggacccctgaggtcacatgcgtggtcgtggacgtgagccacgaggaccccgaagtcaagttcaactggtacgtggacggcgtcgaagtgcataatgccaaaaccaagcctagggaggaacagtacaatagtacttatcgcgtcgtgtcagtcctgaccgtgctgcatcaggattggctgaacgggaaggagtacaaatgcaaggtgtccaacaaggccctgcctgctccaatcgagaagaccatttctaaagcaaagggccagccccgagaacctcaggtctacgtgtatcctccatcccgggacgagctgaccaaaaaccaggtctctctgacatgtctggtgaaggggttttatccatctgatattgctgtggagtgggaaagtaatggacagcccgagaacaattacaagacaactccccctgtgctggactccgatggatctttcgctctggtcagcaaactgacagtggacaagtccagatggcagcagggcaacgtctttagttgttcagtgatgcacgaggcactgcacaatcattacactcagaaaagcctgtccctgtctcccggcaagtgaggatcc

SEQ ID NO: 112 - DNA, 1548 bp, Artificial Sequence
  Description of Artificial Sequence: Synthetic polynucleotide
gaattcgccaccatggctgtgatggcacctcgaacactggtcctgctgctgagcggggcactggcactgacacagacttgggccggagacattcagctgacccagagtcctgcttcactggcagtgagcctgggacagcgagcaacaatctcctgcaaagctagtcagtcagtggactatgatggcgactcctatctgaactggtaccagcagatcccagggcagccccctaagctgctgatctacgacgcctcaaatctggtgagcggcatcccaccacgattcagcggcagcggctctggaaccgattttacactgaacattcacccagtcgagaaggtggacgccgctacctaccattgccagcagtctacagaggacccctggactttcggcgggggaaccaaactggaaatcaagggaggaggaggcagtggcggaggagggtcaggaggaggaggaagccaggtgcagctgcagcagagcggagcagagctggtcagaccaggaagctccgtgaaaatttcctgtaaggcatctggctatgccttttctagttactggatgaattgggtgaagcagaggccaggacagggcctggaatggatcgggcagatttggcccggggatggagacacaaactataatggaaagttcaaaggcaaggctactctgaccgcagacgagtcaagctccactgcatatatgcagctgtctagtctggccagcgaggattccgctgtctacttttgcgcacggagagaaaccacaactgtgggcaggtactattacgccatggactactggggccaggggaccacagtcaccgtgtcaagcgcagccgaacccaaatcctctgataagacacacacttgccctccatgtccagctcctgagctgctgggaggaccaagcgtgttcctgtttccacctaaacctaaggacactctgatgatctctcggactcccgaagtcacctgtgtggtcgtggatgtgagccacgaggaccctgaagtcaaattcaactggtacgtggatggcgtcgaggtgcataatgccaaaacaaagcctagggaggaacagtataactccacataccgcgtcgtgtctgtcctgactgtgctgcatcaggactggctgaacggaaaggagtacaaatgcaaggtgagcaacaaggccctgccagctcccatcgagaagaccatttccaaagctaagggccagcctcgagaaccacaggtctatgtgctgccacccagccgggacgagctgacaaaaaaccaggtctccctgctgtgtctggtgaagggattctacccttctgatattgcagtggagtgggaaagtaatggccagccagaaaacaattatctgacttggcctccagtgctggattctgacgggagtttctttctgtacagtaaactgaccgtggataagtcacggtggcagcagggaaacgtctttagttgttcagtgatgcacgaggccctgcacaatcattacacccagaaaagcctgtccctgtctcccggcaagtgaggatcc

SEQ ID NO: 113 - protein, 506 aa, Artificial Sequence
  Description of Artificial Sequence: Synthetic polypeptide
EFATMAVMAPRTLVLLLSGALALTQTWAGDIKLQQSGAELARPGASVKMSCKTSGYTFTRYTMHWVKQRPGQGLEWIGYINPSRGYTNYNQKFKDKATLTTDKSSSTAYMQLSSLTSEDSAVYYCARYYDDHYCLDYWGQGTTLTVSSVEGGSGGSGGSGGSGGVDDIQLTQSPAIMSASPGEKVTMTCRASSSVSYMNWYQQKSGTSPKRWIYDTSKVASGVPYRFSGSGSGTSYSLTISSMEAEDAATYYCQQWSSNPLTFGAGTKLELKAAEPKSSDKTHTCPPCPAPELLGGPSVFLFPPKPKDTLMISRTPEVTCVVVDVSHEDPEVKFNWYVDGVEVHNAKTKPREEQYNSTYRVVSVLTVLHQDWLNGKEYKCKVSNKALPAPIEKTISKAKGQPREPQVYVYPPSRDELTKNQVSLTCLVKGFYPSDIAVEWESNGQPENNYKTTPPVLDSDGSFALVSKLTVDKSRWQQGNVFSCSVMHEALHNHYTQKSLSLSPGK

SEQ ID NO: 114 - protein, 513 aa, Artificial Sequence
  Description of Artificial Sequence: Synthetic polypeptide
EFATMAVMAPRTLVLLLSGALALTQTWAGDIQLTQSPASLAVSLGQRATISCKASQSVDYDGDSYLNWYQQIPGQPPKLLIYDASNLVSGIPPRFSGSGSGTDFTLNIHPVEKVDAATYHCQQSTEDPWTFGGGTKLEIKGGGGSGGGGSGGGGSQVQLQQSGAELVRPGSSVKISCKASGYAFSSYWMNWVKQRPGQGLEWIGQIWPGDGDTNYNGKFKGKATLTADESSSTAYMQLSSLASEDSAVYFCARRETTTVGRYYYAMDYWGQGTTVTVSSAAEPKSSDKTHTCPPCPAPELLGGPSVFLFPPKPKDTLMISRTPEVTCVVVDVSHEDPEVKFNWYVDGVEVHNAKTKPREEQYNSTYRVVSVLTVLHQDWLNGKEYKCKVSNKALPAPIEKTISKAKGQPREPQVYVLPPSRDELTKNQVSLLCLVKGFYPSDIAVEWESNGQPENNYLTWPPVLDSDGSFFLYSKLTVDKSRWQQGNVFSCSVMHEALHNHYTQKSLSLSPGK

SEQ ID NO: 115 - DNA, 1518 bp, Artificial Sequence
  Description of Artificial Sequence: Synthetic polynucleotide
gaattcgccaccatggccgtgatggcaccccgcacactggtcctgctgctgagcggagcactggcactgacacagacctgggctgggcagatcgtcctgacacagagcccagcaatcatgtcagccagccccggcgagaaagtcaccatgacatgctcagccagctcctctgtgagctacatgaactggtatcagcagaaaagcggaacatcccccaagagatggatctacgacacttccaagctggcttctggagtgcctgcacacttcaggggcagcggctctgggactagttattcactgaccatttccggcatggaggccgaagatgccgctacctactattgccagcagtggagttcaaacccattcacatttggatctggcactaagctggaaattaatggcggaggaggctccggaggaggagggtctggaggaggaggaagtcaggtccagctgcagcagagcggagctgagctggcacgaccaggagcaagtgtgaaaatgtcctgtaaggccagcggctacactttcacccggtataccatgcattgggtgaaacagagacccgggcagggactggaatggatcgggtacattaatccttcccgaggatacacaaactacaaccagaagtttaaagacaaggctaccctgaccacagataagagctcctctacagcatatatgcagctgagttcactgacttctgaggacagtgccgtgtactattgcgctaggtactatgacgatcactactccctggattattggggccaggggactaccctgaccgtgagctccgcagccgaacctaaatctagtgacaagacacatacttgcccaccttgtccagcaccagagctgctgggaggacctagcgtgttcctgtttccacccaaaccaaaggatacactgatgatctcccggacccctgaagtcacatgtgtggtcgtggacgtgtctcacgaggaccccgaagtcaagttcaactggtacgtggacggcgtcgaggtgcataatgccaaaactaagcccagggaggaacagtacaactccacttatcgcgtcgtgtctgtcctgaccgtgctgcaccaggattggctgaacggcaaggagtacaaatgcaaggtgagcaacaaggccctgcctgctccaatcgagaagaccattagcaaagcaaaggggcagccccgagaacctcaggtctacgtgtatcctccatctcgggacgagctgaccaaaaaccaggtcagtctgacatgtctggtgaagggcttttacccaagcgatattgctgtggagtgggaatccaatgggcagcccgaaaacaattataagacaactccccctgtgctggactcagatgggagcttcgccctggtcagtaaactgactgtggacaagtcacggtggcagcagggaaacgtctttagctgttccgtgatgcatgaggctctgcacaatcattacacccagaaatctctgagtctgtcacccggcaagtgaggatcc

SEQ ID NO: 116 - DNA, 1548 bp, Artificial Sequence; identical to SEQ ID NO: 112
  Description of Artificial Sequence: Synthetic polynucleotide

SEQ ID NO: 117 - protein, 503 aa, Artificial Sequence
  Description of Artificial Sequence: Synthetic polypeptide
EFATMAVMAPRTLVLLLSGALALTQTWAGQIVLTQSPAIMSASPGEKVTMTCSASSSVSYMNWYQQKSGTSPKRWIYDTSKLASGVPAHFRGSGSGTSYSLTISGMEAEDAATYYCQQWSSNPFTFGSGTKLEINGGGGSGGGGSGGGGSQVQLQQSGAELARPGASVKMSCKASGYTFTRYTMHWVKQRPGQGLEWIGYINPSRGYTNYNQKFKDKATLTTDKSSSTAYMQLSSLTSEDSAVYYCARYYDDHYSLDYWGQGTTLTVSSAAEPKSSDKTHTCPPCPAPELLGGPSVFLFPPKPKDTLMISRTPEVTCVVVDVSHEDPEVKFNWYVDGVEVHNAKTKPREEQYNSTYRVVSVLTVLHQDWLNGKEYKCKVSNKALPAPIEKTISKAKGQPREPQVYVYPPSRDELTKNQVSLTCLVKGFYPSDIAVEWESNGQPENNYKTTPPVLDSDGSFALVSKLTVDKSRWQQGNVFSCSVMHEALHNHYTQKSLSLSPGK

SEQ ID NO: 118 - protein, 513 aa, Artificial Sequence; identical to SEQ ID NO: 114
  Description of Artificial Sequence: Synthetic polypeptide

SEQ ID NO: 119 - DNA, 1527 bp, Artificial Sequence
  Description of Artificial Sequence: Synthetic polynucleotide
gaattcgccaccatggctgtgatggctccacgaacactggtcctgctgctgtccggggcactggcactgactcagacttgggctgggcaggtccagctgcagcagtctggagctgagctggcaaggcctggcgcatccgtgaaaatgtcttgcaaggccagtggctacactttcacccggtatactatgcactgggtgaaacagagacccggacagggcctggaatggatcgggtacattaacccttcccgcggatacaccaactacaaccagaagtttaaagacaaggctaccctgaccacagataagagctcctctacagcatatatgcagctgagttcactgactagcgaggactccgctgtgtactattgcgcacgctactatgacgatcattacagcctggattattgggggcagggaactaccctgacagtgagctccgccaaaacaactccaaagctggaggaaggcgagttctccgaagctcgagtcgacatcgtgctgactcagtctccagcaattatgtcagccagccccggggagaaagtcacaatgacttgttccgcctctagttcagtgtcttacatgaattggtatcagcagaaatctggaaccagtcccaagagatggatctacgacacatcaaagctggccagcggcgtgcctgctcactttaggggctccgggtctggaacaagttattcactgactattagcgggatggaggccgaagatgccgctacctactattgccagcagtggagctccaacccattcacctttggctccgggacaaagctggagatcaatcgggcagccgaacccaaatctagtgacaagacccatacatgccccccttgtccagctccagaactgctgggaggacctagcgtgttcctgtttccacccaaaccaaaggatacactgatgattagtagaactcctgaggtcacctgtgtggtcgtggacgtgtcccacgaggaccccgaagtcaagttcaactggtacgtggacggcgtcgaagtgcataatgccaaaaccaagcccagggaggaacagtacaacagtacatatagagtcgtgtcagtgctgaccgtcctgcaccaggattggctgaacggaaaggagtacaaatgcaaggtgtctaacaaggccctgcctgctccaatcgagaagaccattagcaaagctaagggccagccccgagaacctcaggtctacgtgtatcctccatcacgggacgagctgactaaaaaccaggtcagcctgacctgtctggtgaagggcttttacccatctgatatcgcagtggagtgggaaagtaatgggcagcccgagaacaattataagaccacaccccctgtgctggactcagatgggagcttcgcactggtcagcaaactgacagtggataagtccaggtggcagcagggaaacgtctttagctgttccgtgatgcatgaagccctgcacaatcattacacccagaaatctctgagtctgtcacctggcaagtgaggatcc

SEQ ID NO: 120 - DNA, 1548 bp, Artificial Sequence; identical to SEQ ID NO: 112
  Description of Artificial Sequence: Synthetic polynucleotide

SEQ ID NO: 121 - protein, 506 aa, Artificial Sequence
  Description of Artificial Sequence: Synthetic polypeptide
EFATMAVMAPRTLVLLLSGALALTQTWAGQVQLQQSGAELARPGASVKMSCKASGYTFTRYTMHWVKQRPGQGLEWIGYINPSRGYTNYNQKFKDKATLTTDKSSSTAYMQLSSLTSEDSAVYYCARYYDDHYSLDYWGQGTTLTVSSAKTTPKLEEGEFSEARVDIVLTQSPAIMSASPGEKVTMTCSASSSVSYMNWYQQKSGTSPKRWIYDTSKLASGVPAHFRGSGSGTSYSLTISGMEAEDAATYYCQQWSSNPFTFGSGTKLEINRAAEPKSSDKTHTCPPCPAPELLGGPSVFLFPPKPKDTLMISRTPEVTCVVVDVSHEDPEVKFNWYVDGVEVHNAKTKPREEQYNSTYRVVSVLTVLHQDWLNGKEYKCKVSNKALPAPIEKTISKAKGQPREPQVYVYPPSRDELTKNQVSLTCLVKGFYPSDIAVEWESNGQPENNYKTTPPVLDSDGSFALVSKLTVDKSRWQQGNVFSCSVMHEALHNHYTQKSLSLSPGK

SEQ ID NO: 122 - protein, 513 aa, Artificial Sequence; identical to SEQ ID NO: 114
  Description of Artificial Sequence: Synthetic polypeptide

SEQ ID NO: 123 - DNA, 1503 bp, Artificial Sequence
  Description of Artificial Sequence: Synthetic polynucleotide
gaattcgccaccatggccgtgatggctccaagaacactggtcctgctgctgagcggggcactggcactgacacagacatgggccggacaggtccagctgcagcagagcggagctgagctggcacgacctggagcatccgtgaaaatgtcttgcaaggccagtggctacactttcacccggtatacaatgcactgggtgaaacagagacccgggcagggactggaatggatcggctacattaacccttcccgagggtacactaactacaaccagaagtttaaagacaaggctaccctgaccacagataagagctcctctacagcatatatgcagctgagttcactgactagcgaggactccgctgtgtactattgcgcacggtactatgacgatcattactccctggattattggggccaggggactaccctgactgtcagctccgcaaaaacaactccaaagctgggcggggacatcgtgctgacccagtctccagcaattatgtcagccagccccggggagaaagtcacaatgacttgttccgcttctagttcagtgtcttacatgaattggtatcagcagaaatctgggaccagtcccaagagatggatctacgacacatcaaagctggccagcggagtgcctgctcacttcaggggcagcggctctgggacaagttattcactgactatttctggcatggaggccgaagatgccgctacctactattgccagcagtggagctccaacccattcacctttggaagcggcacaaagctggagatcaatagggcagccgaacccaaatctagtgacaagacccatacatgcccaccttgtccagcaccagaactgctgggaggacctagcgtgttcctgtttccacccaaaccaaaggatacactgatgatttctcgcactcctgaggtcacctgtgtggtcgtggacgtcagtcacgaggaccccgaagtcaagttcaactggtacgtggacggcgtcgaagtgcataatgccaaaaccaagcccagggaggaacagtacaacagtacatatagagtcgtgtcagtgctgaccgtcctgcaccaggattggctgaacggaaaggagtacaaatgcaaggtgagcaacaaggccctgcctgctccaatcgagaagaccatttccaaagccaagggccagccccgagaacctcaggtctacgtgtatcctccatcacgggacgagctgactaaaaaccaggtctccctgacctgtctggtgaagggattttacccatctgatatcgccgtggagtgggaaagtaatggccagcccgagaacaattataagaccacaccccctgtgctggactcagatggcagcttcgccctggtcagcaaactgacagtggataagtccagatggcagcaggggaacgtctttagctgttccgtgatgcatgaagctctgcacaatcattacacccagaaatctctgagtctgtcacctggcaagtgaggatcc

SEQ ID NO: 124 - DNA, 1548 bp, Artificial Sequence; identical to SEQ ID NO: 112
  Description of Artificial Sequence: Synthetic polynucleotide

SEQ ID NO: 125 - protein, 498 aa, Artificial Sequence
  Description of Artificial Sequence: Synthetic polypeptide
EFATMAVMAPRTLVLLLSGALALTQTWAGQVQLQQSGAELARPGASVKMSCKASGYTFTRYTMHWVKQRPGQGLEWIGYINPSRGYTNYNQKFKDKATLTTDKSSSTAYMQLSSLTSEDSAVYYCARYYDDHYSLDYWGQGTTLTVSSAKTTPKLGGDIVLTQSPAIMSASPGEKVTMTCSASSSVSYMNWYQQKSGTSPKRWIYDTSKLASGVPAHFRGSGSGTSYSLTISGMEAEDAATYYCQQWSSNPFTFGSGTKLEINRAAEPKSSDKTHTCPPCPAPELLGGPSVFLFPPKPKDTLMISRTPEVTCVVVDVSHEDPEVKFNWYVDGVEVHNAKTKPREEQYNSTYRVVSVLTVLHQDWLNGKEYKCKVSNKALPAPIEKTISKAKGQPREPQVYVYPPSRDELTKNQVSLTCLVKGFYPSDIAVEWESNGQPENNYKTTPPVLDSDGSFALVSKLTVDKSRWQQGNVFSCSVMHEALHNHYTQKSLSLSPGK

SEQ ID NO: 126 - protein, 513 aa, Artificial Sequence; identical to SEQ ID NO: 114
  Description of Artificial Sequence: Synthetic polypeptide

SEQ ID NO: 127 - DNA, 1536 bp, Artificial Sequence
  Description of Artificial Sequence: Synthetic polynucleotide
gaattcgccaccatggccgtgatggcaccaagaacactggtcctgctgctgagcggggcactggcactgacacagacatgggccggacaggtccagctgcagcagagcggagctgagctggcacgaccaggagcaagtgtgaaaatgtcatgcaaggccagcggctacaccttcacacggtatactatgcactgggtgaaacagagacccggacagggcctggaatggatcgggtacattaaccctagccgaggatacaccaactacaaccagaagtttaaagacaaggctaccctgaccacagataagagctcctctacagcatatatgcagctgagttcactgacttctgaggacagtgctgtgtactattgtgcacggtactatgacgatcattactccctggattattgggggcagggaactaccctgaccgtgagctcctctagtacaggaggaggaggcagtggaggaggagggtcaggcggaggaggaagcgacatccagattgtgctgacacagtctccagcaatcatgtccgcctctcccggcgagaaagtcactatgacctgctccgcctcaagctccgtgtcttacatgaattggtatcagcagaaatcaggaaccagccccaagagatggatctacgacacatccaagctggcctctggcgtgcctgctcacttcaggggcagtgggtcaggaactagctattccctgaccattagcggcatggaggccgaagatgccgctacctactattgtcagcagtggtctagtaacccattcacatttggcagcgggactaagctggagatcaatagggcagccgaacccaaatcaagcgacaagacacatacttgccccccttgtccagcaccagaactgctgggaggaccttccgtgttcctgtttccacccaaaccaaaggatacactgatgattagccgcacccctgaggtcacatgcgtggtcgtggacgtgagccacgaggaccccgaagtcaagttcaactggtacgtggacggcgtcgaagtgcataatgccaaaaccaagcctagggaggaacagtacaacagtacatatagagtcgtgtcagtgctgaccgtcctgcaccaggattggctgaacggcaaggagtacaaatgcaaggtgtccaacaaggccctgcctgctccaatcgagaagaccatttctaaagcaaaggggcagccccgagaacctcaggtctacgtgtatcctccatcccgggacgagctgactaaaaaccaggtctctctgacctgtctggtgaagggcttttacccatctgatattgctgtcgagtgggaaagtaatgggcagcccgagaacaattataagacaactccccctgtgctggactccgatgggtctttcgccctggtcagcaaactgacagtggataagtccagatggcagcagggaaacgtcttttcttgtagtgtgatgcatgaagctctgcacaatcattacactcagaaatcactgagcctgtcccccggcaagtgaggatcc

SEQ ID NO: 128 - DNA, 1548 bp, Artificial Sequence; identical to SEQ ID NO: 112
  Description of Artificial Sequence: Synthetic polynucleotide

SEQ ID NO: 129 - protein, 509 aa, Artificial Sequence
  Description of Artificial Sequence: Synthetic polypeptide
EFATMAVMAPRTLVLLLSGALALTQTWAGQVQLQQSGAELARPGASVKMSCKASGYTFTRYTMHWVKQRPGQGLEWIGYINPSRGYTNYNQKFKDKATLTTDKSSSTAYMQLSSLTSEDSAVYYCARYYDDHYSLDYWGQGTTLTVSSSSTGGGGSGGGGSGGGGSDIQIVLTQSPAIMSASPGEKVTMTCSASSSVSYMNWYQQKSGTSPKRWIYDTSKLASGVPAHFRGSGSGTSYSLTISGMEAEDAATYYCQQWSSNPFTFGSGTKLEINRAAEPKSSDKTHTCPPCPAPELLGGPSVFLFPPKPKDTLMISRTPEVTCVVVDVSHEDPEVKFNWYVDGVEVHNAKTKPREEQYNSTYRVVSVLTVLHQDWLNGKEYKCKVSNKALPAPIEKTISKAKGQPREPQVYVYPPSRDELTKNQVSLTCLVKGFYPSDIAVEWESNGQPENNYKTTPPVLDSDGSFALVSKLTVDKSRWQQGNVFSCSVMHEALHNHYTQKSLSLSPGK

SEQ ID NO: 130 - protein, 513 aa, Artificial Sequence; identical to SEQ ID NO: 114
  Description of Artificial Sequence: Synthetic polypeptide

SEQ ID NO: 131 - DNA, 1548 bp, Artificial Sequence; identical to SEQ ID NO: 37
  Description of Artificial Sequence: Synthetic polynucleotide

SEQ ID NO: 132 - DNA, 1527 bp, Artificial Sequence
  Description of Artificial Sequence: Synthetic polynucleotide
gaattcgccaccatggctgtgatggctcctagaacactggtcctgctgctgtccggggcactggcactgactcagacttgggccgggcaggtccagctgcagcagtctggagcagagctggctaggcctggagcttccgtgaaaatgtcttgcaaagcaagtggctacaccttcacacggtatactatgcactgggtgaaacagagacccggacagggcctggaatggatcgggtacattaacccttcccgcggatacaccaactacaaccagaagtttaaagacaaggccactctgaccacagataagagctcctctaccgcttatatgcagctgagttcactgacaagcgaggactccgccgtgtactattgcgctcgctactatgacgatcattacagcctggattattgggggcagggaactaccctgacagtgagctccgcaaaaacaactccaaagctggaggaaggcgagttctccgaagcccgagtcgacatcgtgctgactcagtctccagctattatgtcagcaagccccggggagaaagtcactatgacctgttccgcctctagttcagtgtcttacatgaattggtatcagcagaaatctggaactagtcccaagagatggatctacgacacctcaaagctggcaagcggagtgcctgcacactttaggggctccgggtctggaactagttattcactgaccattagcgggatggaggccgaagatgccgctacctactattgccagcagtggagctccaacccattcacatttggctccgggactaagctggagatcaatcgggcagccgaacccaaatctagtgacaagacacatacttgccccccttgtccagctccagaagctgcaggaggacctagcgtgttcctgtttccacccaaaccaaaggatacactgatgattagtagaacccctgaggtcacatgtgtggtcgtgagcgtgtcccacgaggaccccgaagtcaagttcaactggtacgtggacggcgtcgaagtgcataatgccaaaaccaagcccagggaggaacagtacaacagtacctatcgcgtcgtgtcagtcctgacagtgctgcaccaggattggctgaacggaaaggagtacaaatgcaaggtgtctaacaaggcactgcctgccccaatcgagaagaccattagcaaagctaagggccagccccgagaacctcaggtctacgtgctgcctccatcacgggacgagctgacaaaaaaccaggtcagcctgctgtgtctggtgaagggcttctatccatctgatatcgcagtggagtgggaaagtaatgggcagcccgagaacaattacctgacatggccccctgtcctggactcagatgggagcttctttctgtatagcaaactgactgtggataagtccaggtggcagcagggaaacgtctttagctgttccgtgatgcatgaagccctgcacaatcattacacccagaaatctctgagtctgtcacctggcaagtgaggatcc

SEQ ID NO: 133 - protein, 513 aa, Artificial Sequence; identical to SEQ ID NO: 38
  Description of Artificial Sequence: Synthetic polypeptide

SEQ ID NO: 134 - protein, 506 aa, Artificial Sequence
  Description of Artificial Sequence: Synthetic polypeptide
EFATMAVMAPRTLVLLLSGALALTQTWAGQVQLQQSGAELARPGASVKMSCKASGYTFTRYTMHWVKQRPGQGLEWIGYINPSRGYTNYNQKFKDKATLTTDKSSSTAYMQLSSLTSEDSAVYYCARYYDDHYSLDYWGQGTTLTVSSAKTTPKLEEGEFSEARVDIVLTQSPAIMSASPGEKVTMTCSASSSVSYMNWYQQKSGTSPKRWIYDTSKLASGVPAHFRGSGSGTSYSLTISGMEAEDAATYYCQQWSSNPFTFGSGTKLEINRAAEPKSSDKTHTCPPCPAPEAAGGPSVFLFPPKPKDTLMISRTPEVTCVVVSVSHEDPEVKFNWYVDGVEVHNAKTKPREEQYNSTYRVVSVLTVLHQDWLNGKEYKCKVSNKALPAPIEKTISKAKGQPREPQVYVLPPSRDELTKNQVSLLCLVKGFYPSDIAVEWESNGQPENNYLTWPPVLDSDGSFFLYSKLTVDKSRWQQGNVFSCSVMHEALHNHYTQKSLSLSPGK

SEQ ID NO: 135 - DNA, 1548 bp, Artificial Sequence; identical to SEQ ID NO: 37
  Description of Artificial Sequence: Synthetic polynucleotide

SEQ ID NO: 136 - DNA, 1503 bp, Artificial Sequence
  Description of Artificial Sequence: Synthetic polynucleotide
gaattcgccaccatggccgtgatggctcctagaacactggtcctgctgctgtccggggctctggcactgactcagacttgggctgggcaggtccagctgcagcagagcggagcagagctggctcgacctggagcttccgtgaaaatgtcttgcaaagcaagtggctacaccttcacacggtatacaatgcactgggtgaaacagagacccgggcagggactggaatggatcggctacattaacccttcccgagggtacactaactacaaccagaagtttaaagacaaggccactctgaccacagataagagctcctctaccgcttatatgcagctgagttcactgacaagcgaggactccgccgtgtactattgcgctcggtactatgacgatcattactccctggattattggggccaggggactaccctgacagtcagctccgcaaaaacaactccaaagctgggcggggacatcgtgctgactcagtctccagctattatgtcagcaagccccggggagaaagtcactatgacctgttccgcctctagttcagtgtcttacatgaattggtatcagcagaaatctgggactagtcccaagagatggatctacgacacctcaaagctggcaagcggagtgcctgcacacttcaggggcagcggctctgggactagttattcactgaccatttctggcatggaggccgaagatgccgctacctactattgccagcagtggagctccaacccattcacatttggaagcggcactaagctggagatcaatagggcagccgaacccaaatctagtgacaagacacatacttgccccccttgtccagctcccgaagctgcaggaggccctagcgtgttcctgtttccacccaaaccaaaggatacactgatgatttctcgcacccctgaggtcacatgtgtggtcgtgagcgtcagtcacgaggaccccgaagtcaagtttaactggtacgtggacggcgtcgaagtgcataatgccaaaaccaagcccagggaggaacagtacaacagtacctatcgcgtcgtgtcagtcctgacagtgctgcaccaggattggctgaacggaaaggagtacaaatgcaaggtgagcaacaaggcactgcctgccccaatcgagaagactatttccaaagctaagggccagccccgagaacctcaggtctacgtgctgcctccatcacgggacgagctgaccaaaaaccaggtctccctgctgtgtctggtgaagggattctatccatctgatatcgcagtggagtgggaaagtaatggccagcccgagaacaattacctgacctggccccctgtgctggactcagatggcagcttctttctgtatagcaaactgacagtggataagtccagatggcagcaggggaacgtctttagctgttccgtgatgcatgaagccctgcacaatcattacacccagaaatctctgagtctgtcacctggcaagtgaggatcc

SEQ ID NO: 137 - protein, 513 aa, Artificial Sequence; identical to SEQ ID NO: 38
  Description of Artificial Sequence: Synthetic polypeptide

SEQ ID NO: 138 - protein, 498 aa, Artificial Sequence
  Description of Artificial Sequence: Synthetic polypeptide
EFATMAVMAPRTLVLLLSGALALTQTWAGQVQLQQSGAELARPGASVKMSCKASGYTFTRYTMHWVKQRPGQGLEWIGYINPSRGYTNYNQKFKDKATLTTDKSSSTAYMQLSSLTSEDSAVYYCARYYDDHYSLDYWGQGTTLTVSSAKTTPKLGGDIVLTQSPAIMSASPGEKVTMTCSASSSVSYMNWYQQKSGTSPKRWIYDTSKLASGVPAHFRGSGSGTSYSLTISGMEAEDAATYYCQQWSSNPFTFGSGTKLEINRAAEPKSSDKTHTCPPCPAPEAAGGPSVFLFPPKPKDTLMISRTPEVTCVVVSVSHEDPEVKFNWYVDGVEVHNAKTKPREEQYNSTYRVVSVLTVLHQDWLNGKEYKCKVSNKALPAPIEKTISKAKGQPREPQVYVLPPSRDELTKNQVSLLCLVKGFYPSDIAVEWESNGQPENNYLTWPPVLDSDGSFFLYSKLTVDKSRWQQGNVFSCSVMHEALHNHYTQKSLSLSPGK

SEQ ID NO: 139 - DNA, 1527 bp, Artificial Sequence
  Description of Artificial Sequence: Synthetic polynucleotide
gaattcgccaccatggctgtgatggcacctagaaccctggtcctgctgctgtccggggcactggcactgactcagacttgggctggggatattaagctgcagcagagcggagcagagctggctcgaccaggagccagtgtgaaaatgtcatgcaagacaagcggctacaccttcacacggtatactatgcactgggtgaaacagagacccggccaggggctggaatggatcggatatattaacccttcccgaggctacaccaactataatcagaagtttaaagacaaggcaaccctgaccacagataagagctcctctacagcctacatgcagctgagttcactgactagtgaggactcagccgtgtactattgcgctaggtactatgacgatcattactgtctggattattggggacagggcactaccctgactgtcagctccgtggaaggagggagcggaggctccggaggatctggcgggagtggaggcgtggacgatatccagctgacccagtccccagctattatgtccgcatctcccggcgagaaagtgactatgacctgccgcgcatctagttcagtgagctacatgaactggtatcagcagaaatcaggcaccagccccaagagatggatctacgacacatccaaggtcgcttctggggtgccttataggttcagtgggtcaggaagcggcacttcctactctctgaccattagctccatggaggctgaagatgccgctacatactattgtcagcagtggtctagtaatccactgacatttggggcaggaactaaactggagctgaaggcagccgaacccaaatcaagcgacaagacacacacttgcccaccttgtccagcaccagaagctgcaggaggacctagcgtgttcctgtttccacccaaaccaaaggatacactgatgatcagccggacccctgaggtcacatgcgtggtcgtgagcgtgagccacgaggaccccgaagtcaagttcaactggtacgtggacggcgtcgaagtgcataatgccaaaaccaagcctagggaggaacagtacaatagtacttatcgcgtcgtgtcagtcctgaccgtgctgcatcaggattggctgaacgggaaggagtacaaatgcaaggtgtccaacaaggcactgcctgccccaatcgagaagaccatttctaaagccaagggccagccccgagaacctcaggtctacgtgtatcctccatcccgggacgagctgaccaaaaaccaggtctctctgacatgtctggtgaaggggttttatccatctgatattgccgtggagtgggaaagtaatggacagcccgagaacaattacaagacaactccccctgtgctggactccgatggatctttcgccctggtcagcaaactgacagtggacaagtccagatggcagcagggcaacgtctttagttgttcagtgatgcacgaggctctgcacaatcattacactcagaaaagcctgtccctgtctcccggcaagtgaggatcc

SEQ ID NO: 140 - DNA, 1548 bp, Artificial Sequence; identical to SEQ ID NO: 47
  Description of Artificial Sequence: Synthetic polynucleotide

SEQ ID NO: 141 - protein, 506 aa, Artificial Sequence
  Description of Artificial Sequence: Synthetic polypeptide
EFATMAVMAPRTLVLLLSGALALTQTWAGDIKLQQSGAELARPGASVKMSCKTSGYTFTRYTMHWVKQRPGQGLEWIGYINPSRGYTNYNQKFKDKATLTTDKSSSTAYMQLSSLTSEDSAVYYCARYYDDHYCLDYWGQGTTLTVSSVEGGSGGSGGSGGSGGVDDIQLTQSPAIMSASPGEKVTMTCRASSSVSYMNWYQQKSGTSPKRWIYDTSKVASGVPYRFSGSGSGTSYSLTISSMEAEDAATYYCQQWSSNPLTFGAGTKLELKAAEPKSSDKTHTCPPCPAPEAAGGPSVFLFPPKPKDTLMISRTPEVTCVVVSVSHEDPEVKFNWYVDGVEVHNAKTKPREEQYNSTYRVVSVLTVLHQDWLNGKEYKCKVSNKALPAPIEKTISKAKGQPREPQVYVYPPSRDELTKNQVSLTCLVKGFYPSDIAVEWESNGQPENNYKTTPPVLDSDGSFALVSKLTVDKSRWQQGNVFSCSVMHEALHNHYTQKSLSLSPGK

SEQ ID NO: 142 - protein, 513 aa, Artificial Sequence; identical to SEQ ID NO: 48
  Description of Artificial Sequence: Synthetic polypeptide

SEQ ID NO: 143 - DNA, 1548 bp, Artificial Sequence; identical to SEQ ID NO: 95
  Description of Artificial Sequence: Synthetic polynucleotide

SEQ ID NO: 144 - DNA, 1518 bp, Artificial Sequence
  Description of Artificial Sequence: Synthetic polynucleotide
gaattcgccaccatggccgtgatggcacctcgcaccctggtcctgctgctgagcggggcactggcactgacacagacttgggccggacagatcgtcctgacacagagcccagctatcatgtcagcaagccccggcgagaaagtcacaatgacttgctcagccagctcctctgtgagctacatgaactggtatcagcagaaaagcggaacctcccccaagagatggatctacgacacatccaagctggcctctggagtgcctgctcacttcaggggcagcggctctgggaccagttattcactgacaatttccggcatggaggccgaagatgccgctacctactattgccagcagtggagttcaaacccattcacttttggatctggcaccaagctggaaattaatggcggaggaggctccggaggaggagggtctggaggaggaggaagtcaggtgcagctgcagcagtccggagcagagctggctcgaccaggagctagtgtgaaaatgtcctgtaaggcaagcggctacaccttcacacggtataccatgcattgggtgaaacagagacccgggcagggactggaatggatcgggtacattaatcctagccgaggatacacaaactacaaccagaagtttaaagacaaggccactctgaccacagataagagctcctctaccgcttatatgcagctgagttcactgacatctgaggacagtgcagtgtactattgcgccaggtactatgacgatcactactgtctggattattggggccaggggactaccctgacagtgagctccgcagccgaacctaaatctagtgacaagactcatacctgccccccttgtccagcaccagagctgctgggaggaccttccgtgttcctgtttccacccaaaccaaaggatactctgatgatctcccggacacctgaagtcacttgcgtggtcgtggacgtgtctcacgaggaccccgaagtcaagtttaactggtacgtggacggcgtcgaggtgcataatgccaaaaccaagcccagggaggaacagtacgcctccacatatcgcgtcgtgtctgtcctgactgtgctgcaccaggattggctgaacggcaaggagtacaaatgcaaggtgagcaacaaggcactgcctgccccaatcgagaagacaattagcaaagcaaaggggcagccccgagaacctcaggtctacgtgctgcctccatctcgggacgagctgactaaaaaccaggtcagtctgctgtgtctggtgaagggcttctatccaagcgatattgctgtggagtgggaatccaatgggcagcccgaaaacaattacctgacttggccccctgtcctggactcagatgggagcttctttctgtatagtaaactgaccgtggacaagtcacggtggcagcagggaaacgtctttagctgttccgtgatgcatgaggccctgcacaatcattacacccagaaatctctgagtctgtcacccggcaagtgaggatcc

SEQ ID NO: 145 - protein, 513 aa, Artificial Sequence; identical to SEQ ID NO: 97
  Description of Artificial Sequence: Synthetic polypeptide

SEQ ID NO: 146 - protein, 503 aa, Artificial Sequence
  Description of Artificial Sequence: Synthetic polypeptide
EFATMAVMAPRTLVLLLSGALALTQTWAGQIVLTQSPAIMSASPGEKVTMTCSASSSVSYMNWYQQKSGTSPKRWIYDTSKLASGVPAHFRGSGSGTSYSLTISGMEAEDAATYYCQQWSSNPFTFGSGTKLEINGGGGSGGGGSGGGGSQVQLQQSGAELARPGASVKMSCKASGYTFTRYTMHWVKQRPGQGLEWIGYINPSRGYTNYNQKFKDKATLTTDKSSSTAYMQLSSLTSEDSAVYYCARYYDDHYCLDYWGQGTTLTVSSAAEPKSSDKTHTCPPCPAPELLGGPSVFLFPPKPKDTLMISRTPEVTCVVVDVSHEDPEVKFNWYVDGVEVHNAKTKPREEQYASTYRVVSVLTVLHQDWLNGKEYKCKVSNKALPAPIEKTISKAKGQPREPQVYVLPPSRDELTKNQVSLLCLVKGFYPSDIAVEWESNGQPENNYLTWPPVLDSDGSFFLYSKLTVDKSRWQQGNVFSCSVMHEALHNHYTQKSLSLSPGK

SEQ ID NO: 147 - DNA, 1548 bp, Artificial Sequence; identical to SEQ ID NO: 95
  Description of Artificial Sequence: Synthetic polynucleotide

SEQ ID NO: 148 - DNA, 1518 bp, Artificial Sequence
  Description of Artificial Sequence: Synthetic polynucleotide
gaattcgccaccatggccgtgatggcaccccgaacactggtcctgctgctgagcggggcactggcactgacacagacttgggctggacagatcgtcctgacacagagcccagcaatcatgtcagccagccccggcgagaaagtcacaatgacttgctcagcaagctcctctgtgagctacatgaactggtatcagcagaaaagcggaacctcccccaagagatggatctacgacacatccaagctggcttctggagtgcctgcacacttcaggggcagcggctctgggaccagttattcactgacaatttccggcatggaggctgaagatgccgctacctactattgccagcagtggagttcaaacccattcacttttggatctggcaccaagctggaaattaatggcggaggaggctccggaggaggagggtctggaggaggaggaagtcaggtgcagctgcagcagagcggagctgagctggcacgaccaggagcaagtgtgaaaatgtcctgtaaggccagcggctacaccttcacacggtataccatgcattgggtgaaacagagacccgggcagggactggaatggatcgggtacattaatccttcccgaggatacacaaactacaaccagaagtttaaagacaaggctactctgaccacagataagagctcctctaccgcatatatgcagctgagttcactgacatctgaggacagtgccgtgtactattgcgctaggtactatgacgatcactactccctggattattggggccaggggactaccctgacagtgagctccgcagccgaacctaaatctagtgacaagactcatacctgccccccttgtccagcaccagagctgctgggaggacctagcgtgttcctgtttccacccaaaccaaaggatactctgatgatctcccggacacctgaagtcacttgtgtggtcgtggacgtgtctcacgaggaccccgaagtcaagtttaactggtacgtggacggcgtcgaggtgcataatgccaaaaccaagcccagggaggaacagtacgcctccacatatcgcgtcgtgtctgtcctgactgtgctgcaccaggattggctgaacggcaaggagtacaaatgcaaggtgagcaacaaggccctgcctgctccaatcgagaagacaattagcaaagccaaggggcagccccgagaacctcaggtctacgtgctgcctccatctcgggacgagctgactaaaaaccaggtcagtctgctgtgtctggtgaagggcttctatccaagcgatattgctgtggagtgggaatccaatgggcagcccgaaaacaattacctgacttggccccctgtcctggactcagatgggagcttctttctgtatagtaaactgaccgtggacaagtcacggtggcagcagggaaacgtctttagctgttccgtgatgcatgaggccctgcacaatcattacacccagaaatctctgagtctgtcacccggcaagtgaggatcc

SEQ ID NO: 149 - protein, 513 aa, Artificial Sequence; identical to SEQ ID NO: 97
  Description of Artificial Sequence: Synthetic polypeptide

SEQ ID NO: 150 - protein, 503 aa, Artificial Sequence
  Description of Artificial Sequence: Synthetic polypeptide
EFATMAVMAPRTLVLLLSGALALTQTWAGQIVLTQSPAIMSASPGEKVTMTCSASSSVSYMNWYQQKSGTSPKRWIYDTSKLASGVPAHFRGSGSGTSYSLTISGMEAEDAATYYCQQWSSNPFTFGSGTKLEINGGGGSGGGGSGGGGSQVQLQQSGAELARPGASVKMSCKASGYTFTRYTMHWVKQRPGQGLEWIGYINPSRGYTNYNQKFKDKATLTTDKSSSTAYMQLSSLTSEDSAVYYCARYYDDHYSLDYWGQGTTLTVSSAAEPKSSDKTHTCPPCPAPELLGGPSVFLFPPKPKDTLMISRTPEVTCVVVDVSHEDPEVKFNWYVDGVEVHNAKTKPREEQYASTYRVVSVLTVLHQDWLNGKEYKCKVSNKALPAPIEKTISKAKGQPREPQVYVLPPSRDELTKNQVSLLCLVKGFYPSDIAVEWESNGQPENNYLTWPPVLDSDGSFFLYSKLTVDKSRWQQGNVFSCSVMHEALHNHYTQKSLSLSPGK

SEQ ID NO: 151 - DNA, 1548 bp, Artificial Sequence; identical to SEQ ID NO: 95
  Description of Artificial Sequence: Synthetic polynucleotide

SEQ ID NO: 152 - DNA, 1527 bp, Artificial Sequence
  Description of Artificial Sequence: Synthetic polynucleotide
gaattcgccaccatggccgtgatggctcctcggaccctggtgctgctgctgagtggggctctggctctgacacagacttgggccggacaggtgcagctgcagcagtctggagctgagctggcaaggcctggcgcatccgtgaaaatgtcttgcaaggccagtggctacaccttcacacggtatactatgcactgggtgaaacagagacccggacagggcctggaatggatcgggtacattaacccttcccgcggatacaccaactacaaccagaagtttaaagacaaggctactctgaccacagataagagctcctctaccgcatatatgcagctgagttcactgacaagcgaggactccgctgtgtactattgcgcacgctactatgacgatcattacagcctggattattgggggcagggaactaccctgacagtgagctccgccaaaacaactccaaagctggaggaaggcgagttctccgaagctcgagtcgacatcgtgctgactcagtctccagcaattatgtcagccagccccggggagaaagtcactatgacctgttccgcctctagttcagtgtcttacatgaattggtatcagcagaaatctggaactagtcccaagagatggatctacgacacctcaaagctggccagcggcgtgcctgctcactttaggggctccgggtctggaactagttattcactgaccattagcgggatggaggccgaagatgccgctacctactattgccagcagtggagctccaacccattcacatttggctccgggactaagctggagatcaatcgggcagccgaacccaaatctagtgacaagacacatacttgccccccttgtccagcaccagaactgctgggaggacctagcgtgttcctgtttccacccaaaccaaaggatacactgatgattagtagaacccctgaggtcacatgtgtggtcgtggacgtgtcccacgaggaccccgaagtcaagttcaactggtacgtggacggcgtcgaagtgcataatgccaaaaccaagcccagggaggaacagtacgccagtacctatcgcgtcgtgtcagtcctgacagtgctgcaccaggattggctgaacggaaaggagtacaaatgcaaggtgtctaacaaggccctgcctgctccaatcgagaagaccattagcaaagcaaagggccagccccgagaacctcaggtctacgtgctgcctccatcacgggacgagctgacaaaaaaccaggtcagcctgctgtgtctggtgaagggcttctatccatctgatatcgctgtggagtgggaaagtaatgggcagcccgagaacaattacctgacatggccccctgtcctggactcagatgggagcttctttctgtatagcaaactgactgtggataagtccaggtggcagcagggaaacgtctttagctgttccgtgatgcatgaagccctgcacaatcattacacccagaaatctctgagtctgtcacctggcaagtgaggatcc

SEQ ID NO: 153 - protein, 513 aa, Artificial Sequence; identical to SEQ ID NO: 97
  Description of Artificial Sequence: Synthetic polypeptide

SEQ ID NO: 154 - protein, 506 aa, Artificial Sequence
  Description of Artificial Sequence: Synthetic polypeptide
EFATMAVMAPRTLVLLLSGALALTQTWAGQVQLQQSGAELARPGASVKMSCKASGYTFTRYTMHWVKQRPGQGLEWIGYINPSRGYTNYNQKFKDKATLTTDKSSSTAYMQLSSLTSEDSAVYYCARYYDDHYSLDYWGQGTTLTVSSAKTTPKLEEGEFSEARVDIVLTQSPAIMSASPGEKVTMTCSASSSVSYMNWYQQKSGTSPKRWIYDTSKLASGVPAHFRGSGSGTSYSLTISGMEAEDAATYYCQQWSSNPFTFGSGTKLEINRAAEPKSSDKTHTCPPCPAPELLGGPSVFLFPPKPKDTLMISRTPEVTCVVVDVSHEDPEVKFNWYVDGVEVHNAKTKPREEQYASTYRVVSVLTVLHQDWLNGKEYKCKVSNKALPAPIEKTISKAKGQPREPQVYVLPPSRDELTKNQVSLLCLVKGFYPSDIAVEWESNGQPENNYLTWPPVLDSDGSFFLYSKLTVDKSRWQQGNVFSCSVMHEALHNHYTQKSLSLSPGK

SEQ ID NO: 155 - DNA, 1548 bp, Artificial Sequence; identical to SEQ ID NO: 95
  Description of Artificial Sequence: Synthetic polynucleotide

SEQ ID NO: 156 - DNA, 1503 bp, Artificial Sequence
  Description of Artificial Sequence: Synthetic polynucleotide
gaattcgccaccatggccgtgatggctcctagaacactggtcctgctgctgagcggggcactggcactgacacagacttgggctgggcaggtccagctgcagcagagcggagctgagctggcacgacctggagcatccgtgaaaatgtcttgcaaggccagtggctacaccttcacacggtatacaatgcactgggtgaaacagagacccgggcagggactggaatggatcggctacattaacccttcccgagggtacactaactacaaccagaagtttaaagacaaggctactctgaccacagataagagctcctctaccgcatatatgcagctgagttcactgacaagcgaggactccgctgtgtactattgcgcacggtactatgacgatcattactccctggattattggggccaggggactaccctgacagtcagctccgccaaaacaactccaaagctgggcggggacatcgtgctgactcagtctccagcaattatgtcagccagccccggggagaaagtcactatgacctgttccgcttctagttcagtgtcttacatgaattggtatcagcagaaatctgggactagtcccaagagatggatctacgacacctcaaagctggccagcggagtgcctgctcacttcaggggcagcggctctgggactagttattcactgaccatttctggcatggaggccgaagatgccgctacctactattgccagcagtggagctccaacccattcacatttggaagcggcactaagctggagatcaatagggcagccgaacccaaatctagtgacaagacacatacttgcccaccttgtccagcaccagaactgctgggaggacctagcgtgttcctgtttccacccaaaccaaaggatacactgatgatttctcgcacccctgaggtcacatgtgtggtcgtggacgtcagtcacgaggaccccgaagtcaagtttaactggtacgtggacggcgtcgaagtgcataatgccaaaaccaagcccagggaggaacagtacgccagtacctatcgcgtcgtgtcagtcctgacagtgctgcaccaggattggctgaacggaaaggagtacaaatgcaaggtgagcaacaaggccctgcctgctccaatcgagaagactatttccaaagcaaagggccagccccgagaacctcaggtctacgtgctgcctccatcacgggacgagctgaccaaaaaccaggtctccctgctgtgtctggtgaagggattctatccatctgatatcgctgtggagtgggaaagtaatggccagcccgagaacaattacctgacctggccccctgtgctggactcagatggcagcttctttctgtatagcaaactgacagtggataagtccagatggcagcaggggaacgtctttagctgttccgtgatgcatgaagccctgcacaatcattacacccagaaatctctgagtctgtcacctggcaagtgaggatcc

SEQ ID NO: 157 - protein, 513 aa, Artificial Sequence; identical to SEQ ID NO: 97
  Description of Artificial Sequence: Synthetic polypeptide

SEQ ID NO: 158 - protein, 498 aa, Artificial Sequence
  Description of Artificial Sequence: Synthetic polypeptide
EFATMAVMAPRTLVLLLSGALALTQTWAGQVQLQQSGAELARPGASVKMSCKASGYTFTRYTMHWVKQRPGQGLEWIGYINPSRGYTNYNQKFKDKATLTTDKSSSTAYMQLSSLTSEDSAVYYCARYYDDHYSLDYWGQGTTLTVSSAKTTPKLGGDIVLTQSPAIMSASPGEKVTMTCSASSSVSYMNWYQQKSGTSPKRWIYDTSKLASGVPAHFRGSGSGTSYSLTISGMEAEDAATYYCQQWSSNPFTFGSGTKLEINRAAEPKSSDKTHTCPPCPAPELLGGPSVFLFPPKPKDTLMISRTPEVTCVVVDVSHEDPEVKFNWYVDGVEVHNAKTKPREEQYASTYRVVSVLTVLHQDWLNGKEYKCKVSNKALPAPIEKTISKAKGQPREPQVYVLPPSRDELTKNQVSLLCLVKGFYPSDIAVEWESNGQPENNYLTWPPVLDSDGSFFLYSKLTVDKSRWQQGNVFSCSVMHEALHNHYTQKSLSLSPGK

SEQ ID NO: 159 - DNA, 1527 bp, Artificial Sequence
  Description of Artificial Sequence: Synthetic polynucleotide
gaattcgccaccatggccgtcatggcacctagaaccctggtcctgctgctgagcggggcactggcactgacacagacttgggctggagacatcaaactgcagcagagcggagctgagctggcacgaccaggagccagtgtgaaaatgtcatgcaagacaagcggctacaccttcacacggtatactatgcactgggtgaaacagagacccggccaggggctggaatggatcggatatattaacccttcccgaggctacaccaactataatcagaagtttaaagacaaggccaccctgaccacagataagagctcctctacagcttacatgcagctgagttcactgactagtgaggactcagctgtgtactattgcgcaaggtactatgacgatcattactgtctggattattggggacagggcactaccctgactgtcagctccgtggaaggagggagcggaggctccggaggatctggcgggagtggaggcgtggacgatatccagctgacccagtccccagcaattatgtccgcctctcccggcgagaaagtgactatgacctgccgcgcctctagttcagtgagctacatgaactggtatcagcagaaatcaggcaccagccccaagagatggatctacgacacatccaaggtcgcttctggggtgccttataggttcagtgggtcaggaagcggcacttcctactctctgaccattagctccatggaggcagaagatgccgctacatactattgtcagcagtggtctagtaatccactgacatttggggccggaactaaactggagctgaaggcagccgaacccaaatcaagcgacaagacacacacttgcccaccttgtccagcaccagaactgctgggaggacctagcgtgttcctgtttccacccaaaccaaaggatacactgatgatcagccggacccctgaggtcacatgcgtggtcgtggacgtgagccacgaggaccccgaagtcaagttcaactggtacgtggacggcgtcgaagtgcataatgccaaaaccaagcctagggaggaacagtacgccagtacttatcgcgtcgtgtcagtcctgaccgtgctgcatcaggattggctgaacgggaaggagtacaaatgcaaggtgtccaacaaggccctgcctgctccaatcgagaagaccatttctaaagcaaagggccagccccgagaacctcaggtctacgtgtatcctccatcccgggacgagctgaccaaaaaccaggtctctctgacatgtctggtgaaggggttttatccatctgatattgctgtggagtgggaaagtaatggacagcccgagaacaattacaagacaactccccctgtgctggactccgatggatctttcgctctggtcagcaaactgacagtggacaagtccagatggcagcagggcaacgtctttagttgttcagtgatgcacgaggcactgcacaatcattacactcagaaaagcctgtccctgtctcccggcaagtgaggatcc

SEQ ID NO: 160 - DNA, 1548 bp, Artificial Sequence
  Description of Artificial Sequence: Synthetic polynucleotide
gaattcgccaccatggctgtgatggcacctcgaacactggtcctgctgctgagcggggcactggcactgacacagacttgggccggagacattcagctgacccagagtcctgcttcactggcagtgagcctgggacagcgagcaacaatctcctgcaaagctagtcagtcagtggactatgatggcgactcctatctgaactggtaccagcagatcccagggcagccccctaagctgctgatctacgacgcctcaaatctggtgagcggcatcccaccacgattcagcggcagcggctctggaaccgattttacactgaacattcacccagtcgagaaggtggacgccgctacctaccattgccagcagtctacagaggacccctggactttcggcgggggaaccaaactggaaatcaagggaggaggaggcagtggcggaggagggtcaggaggaggaggaagccaggtgcagctgcagcagagcggagcagagctggtcagaccaggaagctccgtgaaaatttcctgtaaggcatctggctatgccttttctagttactggatgaattgggtgaagcagaggccaggacagggcctggaatggatcgggcagatttggcccggggatggagacacaaactataatggaaagttcaaaggcaaggctactctgaccgcagacgagtcaagctccactgcatatatgcagctgtctagtctggccagcgaggattccgctgtctacttttgcgcacggagagaaaccacaactgtgggcaggtactattacgccatggactactggggccaggggaccacagtcaccgtgtcaagcgcagccgaacccaaatcctctgataagacacacacttgccctccatgtccagctcctgagctgctgggaggaccaagcgtgttcctgtttccacctaaacctaaggacactctgatgatctctcggactcccgaagtcacctgtgtggtcgtggatgtgagccacgaggaccctgaagtcaaattcaactggtacgtggatggcgtcgaggtgcataatgccaaaacaaagcctagggaggaacagtatgcctccacataccgcgtcgtgtctgtcctgactgtgctgcatcaggactggctgaacggaaaggagtacaaatgcaaggtgagcaacaaggccctgccagctcccatcgagaagaccatttccaaagctaagggccagcctcgagaaccacaggtctatgtgctgccacccagccgggacgagctgacaaaaaaccaggtctccctgctgtgtctggtgaagggattctacccttctgatattgcagtggagtgggaaagtaatggccagccagaaaacaattatctgacttggcctccagtgctggattctgacgggagtttctttctgtacagtaaactgaccgtggataagtcacggtggcagcagggaaacgtctttagttgttcagtgatgcacgaggccctgcacaatcattacacccagaaaagcctgtccctgtctcccggcaagtgaggatcc

SEQ ID NO: 161 - protein, 506 aa, Artificial Sequence
  Description of Artificial Sequence: Synthetic polypeptide
EFATMAVMAPRTLVLLLSGALALTQTWAGDIKLQQSGAELARPGASVKMSCKTSGYTFTRYTMHWVKQRPGQGLEWIGYINPSRGYTNYNQKFKDKATLTTDKSSSTAYMQLSSLTSEDSAVYYCARYYDDHYCLDYWGQGTTLTVSSVEGGSGGSGGSGGSGGVDDIQLTQSPAIMSASPGEKVTMTCRASSSVSYMNWYQQKSGTSPKRWIYDTSKVASGVPYRFSGSGSGTSYSLTISSMEAEDAATYYCQQWSSNPLTFGAGTKLELKAAEPKSSDKTHTCPPCPAPELLGGPSVFLFPPKPKDTLMISRTPEVTCVVVDVSHEDPEVKFNWYVDGVEVHNAKTKPREEQYASTYRVVSVLTVLHQDWLNGKEYKCKVSNKALPAPIEKTISKAKGQPREPQVYVYPPSRDELTKNQVSLTCLVKGFYPSDIAVEWESNGQPENNYKTTPPVLDSDGSFALVSKLTVDKSRWQQGNVFSCSVMHEALHNHYTQKSLSLSPGK

SEQ ID NO: 162 - protein, 513 aa, Artificial Sequence
  Description of Artificial Sequence: Synthetic polypeptide
EFATMAVMAPRTLVLLLSGALALTQTWAGDIQLTQSPASLAVSLGQRATISCKASQSVDYDGDSYLNWYQQIPGQPPKLLIYDASNLVSGIPPRFSGSGSGTDFTLNIHPVEKVDAATYHCQQSTEDPWTFGGGTKLEIKGGGGSGGGGSGGGGSQVQLQQSGAELVRPGSSVKISCKASGYAFSSYWMNWVKQRPGQGLEWIGQIWPGDGDTNYNGKFKGKATLTADESSSTAYMQLSSLASEDSAVYFCARRETTTVGRYYYAMDYWGQGTTVTVSSAAEPKSSDKTHTCPPCPAPELLGGPSVFLFPPKPKDTLMISRTPEVTCVVVDVSHEDPEVKFNWYVDGVEVHNAKTKPREEQYASTYRVVSVLTVLHQDWLNGKEYKCKVSNKALPAPIEKTISKAKGQPREPQVYVLPPSRDELTKNQVSLLCLVKGFYPSDIAVEWESNGQPENNYLTWPPVLDSDGSFFLYSKLTVDKSRWQQGNVFSCSVMHEALHNHYTQKSLSLSPGK

SEQ ID NO: 163 - DNA, 1536 bp, Artificial Sequence
  Description of Artificial Sequence: Synthetic polynucleotide
gaattcgccaccatggccgtgatggcaccaagaacactggtcctgctgctgagcggggcactggcactgacacagacatgggccggacaggtccagctgcagcagagcggagctgagctggcacgaccaggagcaagtgtgaaaatgtcatgcaaggccagcggctacaccttcacacggtatactatgcactgggtgaaacagagacccggacagggcctggaatggatcgggtacattaaccctagccgaggatacaccaactacaaccagaagtttaaagacaaggctaccctgaccacagataagagctcctctacagcatatatgcagctgagttcactgacttctgaggacagtgctgtgtactattgtgcacggtactatgacgatcattactccctggattattgggggcagggaactaccctgaccgtgagctcctctagtacaggaggaggaggcagtggaggaggagggtcaggcggaggaggaagcgacatccagattgtgctgacacagtctccagcaatcatgtccgcctctcccggcgagaaagtcactatgacctgctccgcctcaagctccgtgtcttacatgaattggtatcagcagaaatcaggaaccagccccaagagatggatctacgacacatccaagctggcctctggcgtgcctgctcacttcaggggcagtgggtcaggaactagctattccctgaccattagcggcatggaggccgaagatgccgctacctactattgtcagcagtggtctagtaacccattcacatttggcagcgggactaagctggagatcaatagggcagccgaacccaaatcaagcgacaagacacatacttgccccccttgtccagcaccagaactgctgggaggaccttccgtgttcctgtttccacccaaaccaaaggatacactgatgattagccgcacccctgaggtcacatgcgtggtcgtggacgtgagccacgaggaccccgaagtcaagttcaactggtacgtggacggcgtcgaagtgcataatgccaaaaccaagcctagggaggaacagtacgccagtacatatagagtcgtgtcagtgctgaccgtcctgcaccaggattggctgaacggcaaggagtacaaatgcaaggtgtccaacaaggccctgcctgctccaatcgagaagaccatttctaaagcaaaggggcagccccgagaacctcaggtctacgtgtatcctccatcccgggacgagctgactaaaaaccaggtctctctgacctgtctggtgaagggcttttacccatctgatattgctgtcgagtgggaaagtaatgggcagcccgagaacaattataagacaactccccctgtgctggactccgatgggtctttcgccctggtcagcaaactgacagtggataagtccagatggcagcagggaaacgtcttttcttgtagtgtgatgcatgaagctctgcacaatcattacactcagaaatcactgagcctgtcccccggcaagtgaggatcc

SEQ ID NO: 164 - DNA, 1548 bp, Artificial Sequence; identical to SEQ ID NO: 160
  Description of Artificial Sequence: Synthetic polynucleotide

SEQ ID NO: 165 - protein, 509 aa, Artificial Sequence
  Description of Artificial Sequence: Synthetic polypeptide
EFATMAVMAPRTLVLLLSGALALTQTWAGQVQLQQSGAELARPGASVKMSCKASGYTFTRYTMHWVKQRPGQGLEWIGYINPSRGYTNYNQKFKDKATLTTDKSSSTAYMQLSSLTSEDSAVYYCARYYDDHYSLDYWGQGTTLTVSSSSTGGGGSGGGGSGGGGSDIQIVLTQSPAIMSASPGEKVTMTCSASSSVSYMNWYQQKSGTSPKRWIYDTSKLASGVPAHFRGSGSGTSYSLTISGMEAEDAATYYCQQWSSNPFTFGSGTKLEINRAAEPKSSDKTHTCPPCPAPELLGGPSVFLFPPKPKDTLMISRTPEVTCVVVDVSHEDPEVKFNWYVDGVEVHNAKTKPREEQYASTYRVVSVLTVLHQDWLNGKEYKCKVSNKALPAPIEKTISKAKGQPREPQVYVYPPSRDELTKNQVSLTCLVKGFYPSDIAVEWESNGQPENNYKTTPPVLDSDGSFALVSKLTVDKSRWQQGNVFSCSVMHEALHNHYTQKSLSLSPGK

SEQ ID NO: 166 - protein, 513 aa, Artificial Sequence; identical to SEQ ID NO: 162
  Description of Artificial Sequence: Synthetic polypeptide

SEQ ID NO: 167 - DNA, 792 bp, Artificial Sequence
  Description of Artificial Sequence: Synthetic polynucleotide
gaattcgccaccatggccgtgatggcacctagaaccctggtcctgctgctgagcggggcactggcactgacacagacttgggctggggaacctaagagcagcgacaagactcacacctgcccaccttgtccagcaccagaactgctgggaggaccaagcgtgttcctgtttccacccaagcccaaagataccctgatgatcagccgaacacccgaagtgacttgcgtggtcgtggacgtgtcccacgaggaccccgaagtcaagttcaactggtacgtggacggcgtcgaagtgcataatgctaagacaaaaccacgggaggaacagtacaactctacttatagagtcgtgagtgtcctgaccgtgctgcatcaggattggctgaacggcaaagagtataagtgcaaagtgtctaataaggccctgcctgctccaatcgagaaaaccattagtaaggctaaagggcagcccagggaacctcaggtctacgtgtatcctccaagtcgcgacgagctgaccaagaaccaggtctcactgacatgtctggtgaaaggattttacccttccgatattgcagtggagtgggaatctaatggccagccagagaacaattataagaccacaccccctgtgctggacagcgatgggtccttcgcactggtctcaaagctgacagtggacaaaagcagatggcagcagggaaacgtctttagctgttccgtgatgcacgaagccctgcacaatcattacactcagaagtctctgagtctgtcacctggcaaatgaggatcc

SEQ ID NO: 168 - DNA, 1518 bp, Artificial Sequence; identical to SEQ ID NO: 100
  Description of Artificial Sequence: Synthetic polynucleotide

SEQ ID NO: 169 - protein, 261 aa, Artificial Sequence
  Description of Artificial Sequence: Synthetic polypeptide
EFATMAVMAPRTLVLLLSGALALTQTWAGEPKSSDKTHTCPPCPAPELLGGPSVFLFPPKPKDTLMISRTPEVTCVVVDVSHEDPEVKFNWYVDGVEVHNAKTKPREEQYNSTYRVVSVLTVLHQDWLNGKEYKCKVSNKALPAPIEKTISKAKGQPREPQVYVYPPSRDELTKNQVSLTCLVKGFYPSDIAVEWESNGQPENNYKTTPPVLDSDGSFALVSKLTVDKSRWQQGNVFSCSVMHEALHNHYTQKSLSLSPGK

SEQ ID NO: 170 - protein, 503 aa, Artificial Sequence; identical to SEQ ID NO: 102
  Description of Artificial Sequence: Synthetic polypeptide

SEQ ID NO: 171 - DNA, 792 bp, Artificial Sequence; identical to SEQ ID NO: 167
  Description of Artificial Sequence: Synthetic polynucleotide

SEQ ID NO: 172 - DNA, 1527 bp, Artificial Sequence; identical to SEQ ID NO: 104
  Description of Artificial Sequence: Synthetic polynucleotide

SEQ ID NO: 173 - protein, 261 aa, Artificial Sequence; identical to SEQ ID NO: 169
  Description of Artificial Sequence: Synthetic polypeptide

SEQ ID NO: 174 - protein, 506 aa, Artificial Sequence; identical to SEQ ID NO: 106
  Description of Artificial Sequence: Synthetic polypeptide

SEQ ID NO: 175 - DNA, 792 bp, Artificial Sequence; identical to SEQ ID NO: 167
  Description of Artificial Sequence: Synthetic polynucleotide

SEQ ID NO: 176 - DNA, 1503 bp, Artificial Sequence; identical to SEQ ID NO: 108
  Description of Artificial Sequence: Synthetic polynucleotide

SEQ ID NO: 177 - protein, 261 aa, Artificial Sequence; identical to SEQ ID NO: 169
  Description of Artificial Sequence: Synthetic polypeptide

SEQ ID NO: 178 - protein, 498 aa, Artificial Sequence; identical to SEQ ID NO: 110
  Description of Artificial Sequence: Synthetic polypeptide

SEQ ID NO: 179 - DNA, 1536 bp, Artificial Sequence; identical to SEQ ID NO: 127
  Description of Artificial Sequence: Synthetic polynucleotide

SEQ ID NO: 180 - DNA, 792 bp, Artificial Sequence
  Description of Artificial Sequence: Synthetic polynucleotide
gaattcgccaccatggctgtgatggctccacgcaccctggtcctgctgctgtccggggcactggcactgactcagacttgggctggggaacctaaaagcagcgacaagacccacacatgccccccttgtccagctccagaactgctgggaggaccaagcgtgttcctgtttccacccaagcccaaagatacactgatgatcagccgaactcccgaggtcacctgcgtggtcgtggacgtgtcccacgaggaccccgaagtcaagttcaactggtacgtggacggcgtcgaagtgcataatgcaaagactaaaccacgggaggaacagtacaactctacatatagagtcgtgagtgtcctgactgtgctgcatcaggattggctgaacggcaaagagtataagtgcaaagtgtctaataaggccctgcctgctccaatcgagaaaactattagtaaggcaaaagggcagcccagggaacctcaggtctacgtgctgcctccaagtcgcgacgagctgaccaagaaccaggtctcactgctgtgtctggtgaaaggattctatccttccgatattgccgtggagtgggaatctaatggccagccagagaacaattacctgacctggccccctgtgctggacagcgatgggtccttctttctgtattcaaagctgacagtggacaaaagcagatggcagcagggaaacgtctttagctgttccgtgatgcacgaagccctgcacaatcattacacccagaagtctctgagtctgtcacctggcaaatgaggatcc

SEQ ID NO: 181 - protein, 509 aa, Artificial Sequence; identical to SEQ ID NO: 129
  Description of Artificial Sequence: Synthetic polypeptide

SEQ ID NO: 182 - protein, 261 aa, Artificial Sequence
  Description of Artificial Sequence: Synthetic polypeptide
EFATMAVMAPRTLVLLLSGALALTQTWAGEPKSSDKTHTCPPCPAPELLGGPSVFLFPPKPKDTLMISRTPEVTCVVVDVSHEDPEVKFNWYVDGVEVHNAKTKPREEQYNSTYRVVSVLTVLHQDWLNGKEYKCKVSNKALPAPIEKTISKAKGQPREPQVYVLPPSRDELTKNQVSLLCLVKGFYPSDIAVEWESNGQPENNYLTWPPVLDSDGSFFLYSKLTVDKSRWQQGNVFSCSVMHEALHNHYTQKSLSLSPGK

SEQ ID NO: 183 - DNA, 1548 bp, Artificial Sequence; identical to SEQ ID NO: 85
  Description of Artificial Sequence: Synthetic polynucleotide

SEQ ID NO: 184 - DNA, 1518 bp, Artificial Sequence
  Description of Artificial Sequence: Synthetic polynucleotide
gaattcgccaccatggccgtgatggcaccccgaaccctggtcctgctgctgagcggagccctggcactgacacagacttgggctggacagatcgtcctgacacagtccccagcaatcatgtcagccagccccggggagaaagtcacaatgacttgctcagcaagctcctctgtgagctacatgaactggtatcagcagaaaagcgggacctcccccaagagatggatctacgacacatccaagctggcttctggagtgcctgcacacttcaggggcagcggctctgggaccagttattcactgacaattagcggcatggaggctgaagatgccgctacctactattgccagcagtggagttcaaacccattcacttttggatgtggcaccaagctggaaattaatggcggaggaggctccggaggaggagggtctggaggaggaggaagtcaggtgcagctgcagcagtccggagctgagctggcacgaccaggagcaagtgtgaaaatgtcatgcaaggccagcggctacaccttcacacggtataccatgcattgggtgaaacagagacccggacagtgtctggaatggatcggctacattaatccttctcgagggtacacaaactacaaccagaagtttaaagacaaggctactctgaccacagataagagctcctctaccgcatatatgcagctgagttcactgacatctgaggacagtgccgtgtactattgcgctaggtactatgacgatcactactgtctggattattgggggcagggaactaccctgacagtgagctccgcagccgaacctaaatctagtgacaagactcatacctgccccccttgtccagcaccagagctgctgggaggacctagcgtgttcctgtttccacccaaaccaaaggatactctgatgatctcccggacacctgaagtcacttgcgtggtcgtggacgtgtctcacgaggaccccgaagtcaagtttaactggtacgtggacggcgtcgaggtgcataatgccaaaaccaagcccagggaggaacagtacaactccacatatcgcgtcgtgtctgtcctgactgtgctgcaccaggattggctgaacggaaaggagtacaaatgcaaggtgagcaacaaggccctgcctgctccaatcgagaagacaattagcaaagccaagggccagccccgagaacctcaggtctacgtgctgcctccatctcgggacgagctgactaaaaaccaggtcagtctgctgtgtctggtgaagggattctatccaagcgatattgctgtggagtgggaatccaatggccagcccgaaaacaattacctgacttggccccctgtcctggactcagatggcagcttctttctgtatagtaaactgaccgtggacaagtcacggtggcagcaggggaacgtctttagctgttccgtgatgcatgaggccctgcacaatcattacacccagaaatctctgagtctgtcacccggcaagtgaggatcc

SEQ ID NO: 185 - protein, 513 aa, Artificial Sequence; identical to SEQ ID NO: 87
  Description of Artificial Sequence: Synthetic polypeptide

SEQ ID NO: 186 - protein, 503 aa, Artificial Sequence
  Description of Artificial Sequence: Synthetic polypeptide
EFATMAVMAPRTLVLLLSGALALTQTWAGQIVLTQSPAIMSASPGEKVTMTCSASSSVSYMNWYQQKSGTSPKRWIYDTSKLASGVPAHFRGSGSGTSYSLTISGMEAEDAATYYCQQWSSNPFTFGCGTKLEINGGGGSGGGGSGGGGSQVQLQQSGAELARPGASVKMSCKASGYTFTRYTMHWVKQRPGQCLEWIGYINPSRGYTNYNQKFKDKATLTTDKSSSTAYMQLSSLTSEDSAVYYCARYYDDHYCLDYWGQGTTLTVSSAAEPKSSDKTHTCPPCPAPELLGGPSVFLFPPKPKDTLMISRTPEVTCVVVDVSHEDPEVKFNWYVDGVEVHNAKTKPREEQYNSTYRVVSVLTVLHQDWLNGKEYKCKVSNKALPAPIEKTISKAKGQPREPQVYVLPPSRDELTKNQVSLLCLVKGFYPSDIAVEWESNGQPENNYLTWPPVLDSDGSFFLYSKLTVDKSRWQQGNVFSCSVMHEALHNHYTQKSLSLSPGK

SEQ ID NO: 187 - DNA, 1548 bp, Artificial Sequence; identical to SEQ ID NO: 85
  Description of Artificial Sequence: Synthetic polynucleotide

SEQ ID NO: 188 - DNA, 1518 bp, Artificial Sequence
  Description of Artificial Sequence: Synthetic polynucleotide
gaattcgccaccatggctgtgatggcacctagaacactggtcctgctgctgagcggggcactggcactgacacagacttgggctgggcagatcgtcctgacacagagcccagcaatcatgtcagccagccccggggagaaagtcacaatgacttgctcagcaagctcctctgtgagctacatgaactggtatcagcagaaaagcgggacctcccccaagagatggatctacgacacatccaagctggcttctggagtgcctgcacacttcaggggcagcggctctgggaccagttattcactgacaatttccggcatggaggctgaagatgccgctacctactattgccagcagtggagttcaaacccattcacttttggatgtggcaccaagctggaaattaatggcggaggaggctccggaggaggagggtctggaggaggaggaagtcaggtgcagctgcagcagtccggagctgagctggcacgaccaggagcaagtgtgaaaatgtcatgcaaggccagcggctacaccttcacacggtataccatgcattgggtgaaacagagacccggacagtgtctggaatggatcggctacattaatcctagccgagggtacacaaactacaaccagaagtttaaagacaaggctactctgaccacagataagagctcctctaccgcatatatgcagctgagttcactgacatctgaggacagtgccgtgtactattgcgctaggtactatgacgatcactactccctggattattgggggcagggaactaccctgacagtgagctccgcagccgaacctaaatctagtgacaagactcatacctgcccaccttgtccagcaccagagctgctgggcgggccttctgtgttcctgtttccacccaaaccaaaggatactctgatgatctcccggacacctgaagtcacttgtgtggtcgtggacgtgtctcacgaggaccccgaagtcaagtttaactggtacgtggacggcgtcgaggtgcataatgccaaaaccaagcccagggaggaacagtacaactccacatatcgcgtcgtgtctgtcctgactgtgctgcaccaggattggctgaacggaaaggagtacaaatgcaaggtgagcaacaaggccctgcctgctccaatcgagaagacaattagcaaagccaagggccagccccgagaacctcaggtctacgtgctgcctccatctcgggacgagctgactaaaaaccaggtcagtctgctgtgtctggtgaagggattctatccaagcgatattgctgtggagtgggaatccaatggccagcccgaaaacaattacctgacttggccccctgtcctggactcagatggcagcttctttctgtatagtaaactgaccgtggacaagtcacggtggcagcaggggaacgtctttagctgttccgtgatgcatgaggccctgcacaatcattacacccagaaatctctgagtctgtcacccggcaagtgaggatcc

SEQ ID NO: 189 - protein, 513 aa, Artificial Sequence; identical to SEQ ID NO: 87
  Description of Artificial Sequence: Synthetic polypeptide

SEQ ID NO: 190 - protein, 503 aa, Artificial Sequence
  Description of Artificial Sequence: Synthetic polypeptide
EFATMAVMAPRTLVLLLSGALALTQTWAGQIVLTQSPAIMSASPGEKVTMTCSASSSVSYMNWYQQKSGTSPKRWIYDTSKLASGVPAHFRGSGSGTSYSLTISGMEAEDAATYYCQQWSSNPFTFGCGTKLEINGGGGSGGGGSGGGGSQVQLQQSGAELARPGASVKMSCKASGYTFTRYTMHWVKQRPGQCLEWIGYINPSRGYTNYNQKFKDKATLTTDKSSSTAYMQLSSLTSEDSAVYYCARYYDDHYSLDYWGQGTTLTVSSAAEPKSSDKTHTCPPCPAPELLGGPSVFLFPPKPKDTLMISRTPEVTCVVVDVSHEDPEVKFNWYVDGVEVHNAKTKPREEQYNSTYRVVSVLTVLHQDWLNGKEYKCKVSNKALPAPIEKTISKAKGQPREPQVYVLPPSRDELTKNQVSLLCLVKGFYPSDIAVEWESNGQPENNYLTWPPVLDSDGSFFLYSKLTVDKSRWQQGNVFSCSVMHEALHNHYTQKSLSLSPGK

SEQ ID NO: 191 - DNA, 1527 bp, Artificial Sequence
  Description of Artificial Sequence: Synthetic polynucleotide
gaattcgccaccatggctgtgatggcacctagaacactggtcctgctgctgtccggggcactggcactgactcagacttgggctggggatattaagctgcagcagagcggagctgagctggcacgaccaggagccagtgtgaaaatgtcatgcaagacaagcggctacaccttcacacggtatactatgcactgggtgaaacagagacccggccagtgtctggaatggatcgggtatattaacccttcccgaggatacaccaactacaaccagaagtttaaagacaaggccaccctgaccacagataagagctcctctacagcttacatgcagctgagttcactgactagtgaggactcagctgtgtactattgcgcaaggtactatgacgatcattactgtctggattattggggccaggggactaccctgactgtcagctccgtggaaggagggagcggaggctccggaggatctggcgggagtggaggcgtggacgatatccagctgacccagtccccagcaattatgtccgcctctcccggcgagaaagtgactatgacctgccgcgcctctagttcagtgagctacatgaactggtatcagcagaaatcaggaaccagccccaagagatggatctacgacacatccaaggtcgcatctggcgtgccttataggttcagtggatcaggcagcgggacttcctactctctgaccattagctccatggaggccgaagatgccgctacatactattgccagcagtggtctagtaatccactgacatttggatgtggcactaaactggagctgaaggcagccgaacccaaatcaagcgacaagacacacacttgccccccttgtccagcacccgaactgctggggggacctagcgtgttcctgtttccacccaaaccaaaggatacactgatgatcagccggacccctgaggtcacatgtgtggtcgtggacgtgagccacgaggaccccgaagtcaagttcaactggtacgtggacggcgtcgaagtgcataatgctaaaaccaagcctagggaggaacagtacaatagtacttatcgcgtcgtgtcagtcctgaccgtgctgcatcaggattggctgaacggcaaggagtacaaatgcaaggtgtccaacaaggccctgcctgctccaatcgagaagaccatttctaaagccaaggggcagccccgagaacctcaggtctacgtgtatcctccatcccgggacgagctgaccaaaaaccaggtctctctgacatgtctggtgaagggcttttatccatctgatattgctgtggagtgggaaagtaatgggcagcccgagaacaattacaagacaactccccctgtgctggactccgatgggtctttcgctctggtcagcaaactgacagtggacaagtccagatggcagcagggaaacgtctttagttgctcagtgatgcacgaggcactgcacaatcattacactcagaaaagcctgtccctgtctcccggcaagtgaggatcc

SEQ ID NO: 192 - DNA, 1548 bp, Artificial Sequence; identical to SEQ ID NO: 112
  Description of Artificial Sequence: Synthetic polynucleotide

SEQ ID NO: 193 - protein, 506 aa, Artificial Sequence
  Description of Artificial Sequence: Synthetic polypeptide
EFATMAVMAPRTLVLLLSGALALTQTWAGDIKLQQSGAELARPGASVKMSCKTSGYTFTRYTMHWVKQRPGQCLEWIGYINPSRGYTNYNQKFKDKATLTTDKSSSTAYMQLSSLTSEDSAVYYCARYYDDHYCLDYWGQGTTLTVSSVEGGSGGSGGSGGSGGVDDIQLTQSPAIMSASPGEKVTMTCRASSSVSYMNWYQQKSGTSPKRWIYDTSKVASGVPYRFSGSGSGTSYSLTISSMEAEDAATYYCQQWSSNPLTFGCGTKLELKAAEPKSSDKTHTCPPCPAPELLGGPSVFLFPPKPKDTLMISRTPEVTCVVVDVSHEDPEVKFNWYVDGVEVHNAKTKPREEQYNSTYRVVSVLTVLHQDWLNGKEYKCKVSNKALPAPIEKTISKAKGQPREPQVYVYPPSRDELTKNQVSLTCLVKGFYPSDIAVEWESNGQPENNYKTTPPVLDSDGSFALVSKLTVDKSRWQQGNVFSCSVMHEALHNHYTQKSLSLSPGK

SEQ ID NO: 194 - protein, 513 aa, Artificial Sequence; identical to SEQ ID NO: 114
  Description of Artificial Sequence: Synthetic polypeptide

SEQ ID NO: 195 - DNA, 792 bp, Artificial Sequence; identical to SEQ ID NO: 13
  Description of Artificial Sequence: Synthetic polynucleotide

SEQ ID NO: 196 - DNA, 1542 bp, Artificial Sequence
  Description of Artificial Sequence: Synthetic polynucleotide
gaattcgccaccatggctgtgatggctccaagaacactggtcctgctgctgagcggggcactggcactgacacagacatgggccgggcaggtccagctgcaggaatctggaggaggactggtgaagccaggagggtctctgagactgagttgcgccgcttcaggcttcacctttagctcctactggatgagctgggtgcggcaggcacctggcaaaggactggagtgggtggccaacatcaatagagacgggagtgcttcatactatgtcgatagcgtgaagggaaggttcaccattagtcgcgacgatgcaaaaaactcactgtacctgcagatgaatagcctgagggccgaagacacagctgtctactattgcgcccgggacagaggagtgggctattttgatctgtgggggcgcggaacactggtcactgtgtctagtgcttccacaggaggcgggggatcaggcggaggaggcagcggaggaggagggagccagtccgctctgactcagcctgcatctgtgagtggctcaccagggcagagcatcaccatttcctgtaccggcacatcaagcgatgtcggaggctacaacttcgtgagctggtatcagcagcacccagggaaggcacccaaactgatgatctacgacgtctccgatcgaccaagtggagtgtcagaccggtttagcggcagcaagtctggcaatactgcctctctgatcattagtggactgcaggcagacgatgaggccgattactattgctcctcttatggcagttcaagcacccacgtgattttcgggggaggcaccaaggtcacagtgctgggcgcagccgaacccaagtcctctgacaaaactcatacctgcccaccttgtccagctccagagctgctgggaggaccaagcgtgttcctgtttccacccaagcctaaagatacactgatgatcagccgaactcctgaagtcacctgtgtggtcgtggacgtgtcccacgaggaccccgaagtcaagtttaactggtacgtggacggcgtcgaggtgcataatgccaagactaaacctagagaggaacagtacaactccacatatagggtcgtgtctgtcctgactgtgctgcaccaggattggctgaacggaaaggagtataagtgcaaagtgtctaataaggctctgcctgcaccaatcgagaaaaccattagcaaggctaaagggcagccccgcgaacctcaggtgtacaccctgcctccatctcgagacgagctgacaaagaaccaggtcagcctgctgtgtctggtgaaaggcttctatccaagtgatattgcagtggagtgggaatccaatgggcagcccgaaaacaattacatgacatggccccctgtgctggacagcgatggctccttctttctgtattccaagctgactgtggacaaatctcgctggcagcaggggaacgtctttagttgttcagtgatgcatgaggccctgcacaatcattacacccagaagagcctgtccctgtctcccggcaaatgaggatcc

SEQ ID NO: 197 - protein, 261 aa, Artificial Sequence; identical to SEQ ID NO: 14
  Description of Artificial Sequence: Synthetic polypeptide

SEQ ID NO: 198 - protein, 511 aa, Artificial Sequence
  Description of Artificial Sequence: Synthetic polypeptide
EFATMAVMAPRTLVLLLSGALALTQTWAGQVQLQESGGGLVKPGGSLRLSCAASGFTFSSYWMSWVRQAPGKGLEWVANINRDGSASYYVDSVKGRFTISRDDAKNSLYLQMNSLRAEDTAVYYCARDRGVGYFDLWGRGTLVTVSSASTGGGGSGGGGSGGGGSQSALTQPASVSGSPGQSITISCTGTSSDVGGYNFVSWYQQHPGKAPKLMIYDVSDRPSGVSDRFSGSKSGNTASLIISGLQADDEADYYCSSYGSSSTHVIFGGGTKVTVLGAAEPKSSDKTHTCPPCPAPELLGGPSVFLFPPKPKDTLMISRTPEVTCVVVDVSHEDPEVKFNWYVDGVEVHNAKTKPREEQYNSTYRVVSVLTVLHQDWLNGKEYKCKVSNKALPAPIEKTISKAKGQPREPQVYTLPPSRDELTKNQVSLLCLVKGFYPSDIAVEWESNGQPENNYMTWPPVLDSDGSFFLYSKLTVDKSRWQQGNVFSCSVMHEALHNHYTQKSLSLSPGK

SEQ ID NO: 199 - DNA, 1563 bp, Artificial Sequence
  Description of Artificial Sequence: Synthetic polynucleotide
gaattcgccaccatggccgtgatggcacctagaacactggtcctgctgctgagcggagccctggcactgacacagacttgggccggacaggtccagctggtgcagagcggggcagaggtcaagaaacccggagaaagtctgaagatctcatgcaaagggagtggatactcattcaccagctattggattgcctgggtgaggcagatgcctggcaaggggctggaatacatgggcctgatctatccaggggacagcgatacaaaatactccccctctttccagggccaggtcacaatttccgtggacaagagtgtctcaactgcctatctgcagtggagctccctgaaacctagcgattccgcagtgtacttttgtgccaggcacgacgtcgggtattgcacagatcgcacttgtgctaagtggccagagtggctgggagtgtggggacagggaaccctggtcacagtgtctagtggaggaggaggctcaagcggaggaggctctggaggaggagggtctcagagtgtgctgactcagccaccttcagtcagcgcagctcctggacagaaggtgaccatctcctgctctggcagctctagtaacattggcaacaattacgtgagctggtatcagcagctgcctggcaccgccccaaagctgctgatctacgaccacacaaatcggcccgctggggtgcctgatagattcagtgggtcaaaaagcggaacctccgcttctctggcaattagcggctttcgctccgaggacgaagctgattactattgtgcatcttgggactacacactgagtggctgggtgttcggaggcgggactaagctgaccgtgctgggggcagccgaaccaaagtcaagcgataaaactcatacctgcccaccatgtcctgcaccagagctgctgggaggaccttccgtgttcctgtttcctccaaagccaaaagacaccctgatgatcagccgaacaccagaagtgacttgcgtggtcgtggacgtctcccacgaggaccccgaagtgaagtttaactggtacgtggatggcgtcgaggtgcataatgccaagaccaaaccccgagaggaacagtacaactcaacttatcgggtcgtgagcgtcctgaccgtgctgcaccaggactggctgaacgggaaagagtataagtgcaaagtgtctaataaggccctgcccgctcctatcgagaaaacaattagcaaggcaaaaggccagccaagagaaccccaggtgtacacttatcccccttctagggacgagctgaccaagaaccaggtgagcctgacatgtctggtcaaaggattttaccccagtgatattgctgtggagtgggaatccaatggccagcctgaaaacaattataagaccacaccacccgtgctggactccgatggatctttcgctctggtgtccaagctgactgtcgataaatctcggtggcagcagggcaacgtgtttagttgttcagtcatgcatgaggcactgcacaatcattacacacagaagagcctgtccctgtctcccggcaaatgaggatcc

SEQ ID NO: 200 - DNA, 1542 bp, Artificial Sequence; identical to SEQ ID NO: 196
  Description of Artificial Sequence: Synthetic polynucleotide

SEQ ID NO: 201 - protein, 518 aa, Artificial Sequence [sequence omitted]

SEQ ID NO: 202 - protein, 511 aa, Artificial Sequence; identical to SEQ ID NO: 198
  Description of Artificial Sequence: Synthetic polypeptide

SEQ ID NO: 203 - protein, 483 aa, Artificial Sequence
  Description of Artificial Sequence: Synthetic polypeptide
EVQLVESGGGLVQPGGSLKLSCAASGFTFNKYAMNWVRQAPGKGLEWVARIRSKYNNYATYYADSVKDRFTISRDDSKNTAYLQMNNLKTEDTAVYYCVRHGNFGNSYISYWAYWGQGTLVTVSSGGGGSGGGGSGGGGSQTVVTQEPSLTVSPGGTVTLTCGSSTGAVTSGNYPNWVQQKPGQAPRGLIGGTKFLAPGTPARFSGSLLGGKAALTLSGVQPEDEAEYYCVLWYSNRWVFGGGTKLTVLAAEPKSSDKTHTCPPCPAPEAAGGPSVFLFPPKPKDTLMISRTPEVTCVVVSVSHEDPEVKFNWYVDGVEVHNAKTKPREEQYNSTYRVVSVLTVLHQDWLNGKEYKCKVSNKALPAPIEKTISKAKGQPREPQVYVYPPSRDELTKNQVSLTCLVKGFYPSDIAVEWESNGQPENNYKTTPPVLDSDGSFALVSKLTVDKSRWQQGNVFSCSVMHEALHNHYTQKSLSLSPGK

SEQ ID NO: 204 - DNA, 1455 bp, Artificial Sequence
  Description of Artificial Sequence: Synthetic polynucleotide
ggagaagtccagctggtcgagtccggaggaggactggtgcagccaggagggtcactgaaactgagctgcgccgcttccggcttcacttttaacaagtatgcaatgaattgggtgcggcaggcaccagggaagggactggaatgggtggcccggatcagatctaagtacaacaactacgctacctactatgcagacagtgtgaaggataggttcacaatttctcgcgacgatagtaaaaacactgcttacctgcagatgaacaatctgaagacagaggacactgcagtctactattgcgtgagacacggaaactttggcaatagctacatctcctattgggcatactggggacagggaaccctggtcacagtgagctccggaggaggaggcagcggaggaggaggctctgggggaggcgggagtcagactgtggtcacccaggagccctcactgacagtcagccctggaggcactgtgaccctgacatgtgggtctagtaccggagccgtgacatctggcaactatcccaattgggtgcagcagaaacctggacaggctccacgaggactgattggaggaacaaagttcctggcccccggaactcctgctcgattttccggctctctgctgggagggaaagcagcactgaccctgagcggagtgcagcctgaggatgaagccgagtactattgcgtgctgtggtacagcaacagatgggtgttcggaggcgggacaaagctgactgtgctggctgcagagccaaagtcaagcgacaaaactcacacctgcccaccttgtccagctccagaagcagctggaggaccatccgtgttcctgtttccacccaagcccaaagatacactgatgatctctcgcactcccgaggtcacctgtgtggtcgtgagtgtgtcacacgaagaccctgaggtcaagtttaactggtacgtggatggcgtcgaagtgcataatgccaagaccaaacctcgagaggaacagtataattcaacttaccgggtcgtgagcgtcctgaccgtgctgcatcaggactggctgaacggaaaggagtacaagtgcaaagtgagcaataaggcactgcctgccccaatcgaaaaaaccattagcaaggctaaagggcagccaagagagccccaggtctacgtgtatcctccaagcagggacgaactgaccaagaaccaggtctccctgacatgtctggtgaaagggttctatcctagtgatattgcagtggaatgggagtcaaatggacagccagagaacaattacaagaccacaccccctgtgctggactctgatggcagtttcgcactggtctccaagctgaccgtggataaatctaggtggcagcaggggaacgtctttagctgttccgtgatgcatgaagccctgcacaatcattacacacagaagtctctgagtctgtcacccggcaaatga

SEQ ID NO: 205 - protein, 452 aa, Artificial Sequence
  Description of Artificial Sequence: Synthetic polypeptide
EVQLVESGGGLVQPGRSLRLSCAASGFTFNDYAMHWVRQAPGKGLEWVSTISWNSGSIGYADSVKGRFTISRDNAKKSLYLQMNSLRAEDTALYYCAKDIQYGNYYYGMDVWGQGTTVTVSSASTKGPSVFPLAPSSKSTSGGTAALGCLVKDYFPEPVTVSWNSGALTSGVHTFPAVLQSSGLYSLSSVVTVPSSSLGTQTYICNVNHKPSNTKVDKKVEPKSCDKTHTCPPCPAPELLGGPSVFLFPPKPKDTLMISRTPEVTCVVVDVSHEDPEVKFNWYVDGVEVHNAKTKPREEQYNSTYRVVSVLTVLHQDWLNGKEYKCKVSNKALPAPIEKTISKAKGQPREPQVYVLPPSRDELTKNQVSLLCLVKGFYPSDIAVEWESNGQPENNYLTWPPVLDSDGSFFLYSKLTVDKSRWQQGNVFSCSVMHEALHNHYTQKSLSLSPGK

SEQ ID NO: 206 - DNA, 1362 bp, Artificial Sequence
  Description of Artificial Sequence: Synthetic polynucleotide
ggggaagtccagctggtcgaatctggaggaggactggtgcagcctggacgatccctgagactgtcttgcgccgctagtggcttcacttttaacgactatgcaatgcactgggtgcgccaggcaccagggaagggactggagtgggtgagcaccatctcctggaacagcggatctattggctatgcagacagcgtgaaaggcaggttcacaatcagtcgcgataacgccaagaaatcactgtacctgcagatgaatagcctgcgagccgaagacacagctctgtactattgcgccaaggatattcagtatgggaactactattacggaatggacgtgtggggccaggggaccacagtcaccgtgagctccgcctcaacaaaggggcccagcgtgtttccactggctccctctagtaaaagtacctcaggcgggacagcagccctgggatgtctggtgaaggattacttcccagagcccgtcaccgtgtcttggaacagtggcgctctgacaagcggggtccatacttttccagcagtgctgcagtcaagcggcctgtattccctgtcctctgtggtcactgtgcccagttcaagcctggggactcagacctacatctgcaacgtgaatcacaagccatctaataccaaagtcgacaagaaagtggaacccaagagttgtgataaaacacatacttgcccaccttgtcctgcaccagagctgctgggaggaccatccgtgttcctgtttccacccaagcctaaagacaccctgatgattagcaggactcccgaagtcacctgcgtggtcgtggacgtgtcccacgaggaccccgaagtcaagttcaactggtacgtggatggcgtcgaggtgcataatgctaagacaaaaccccgagaggaacagtataattccacttaccgggtcgtgtctgtcctgaccgtgctgcaccaggactggctgaacggcaaggagtacaagtgcaaagtgtctaataaggctctgcccgcacctatcgagaaaacaattagcaaggctaaagggcagcctagagaaccacaggtctatgtgctgcctccaagcagggacgagctgactaagaaccaggtctccctgctgtgtctggtgaaagggttctaccctagtgatatcgcagtggagtgggaatcaaatggacagccagaaaacaattatctgacatggccccctgtgctggactcagatggaagcttctttctgtactccaagctgactgtggataaatctcggtggcagcagggcaacgtctttagctgttccgtgatgcatgaggccctgcacaatcattacacccagaagtctctgagtctgtcacctggcaaatga

SEQ ID NO: 207 - protein, 214 aa, Artificial Sequence
  Description of Artificial Sequence: Synthetic polypeptide
EIVLTQSPATLSLSPGERATLSCRASQSVSSYLAWYQQKPGQAPRLLIYDASNRATGIPARFSGSGSGTDFTLTISSLEPEDFAVYYCQQRSNWPITFGQGTRLEIKRTVAAPSVFIFPPSDEQLKSGTASVVCLLNNFYPREAKVQWKVDNALQSGNSQESVTEQDSKDSTYSLSSTLTLSKADYEKHKVYACEVTHQGLSSPVTKSFNRGEC

SEQ ID NO: 208 - DNA, 648 bp, Artificial Sequence
  Description of Artificial Sequence: Synthetic polynucleotide
ggggaaatcgtcctgacacagtcccctgccactctgagtctgtcaccaggcgagagggctaccctgtcttgccgcgcaagccagtccgtgagctcctacctggcctggtatcagcagaagccagggcaggctcccagactgctgatctacgacgcatccaaccgagcaaccggcatccccgcacggttctctggcagtgggtcaggaacagactttaccctgacaatctctagtctggagcccgaagatttcgctgtgtactattgccagcagaggtctaattggcctatcacctttggccaggggacacggctggagattaagagaactgtggccgctccaagtgtcttcatttttccccctagcgacgaacagctgaaatccggcacagcctctgtggtctgtctgctgaacaatttctacccccgcgaggcaaaggtgcagtggaaagtcgataacgccctgcagagcggcaacagccaggagtctgtgactgaacaggacagtaaggattcaacctatagcctgtcaagcactctgaccctgagcaaagctgattacgagaagcacaaagtgtatgcatgcgaagtcacacatcagggactgtcctctcccgtcactaaaagctttaaccgaggcgaatgttga

SEQ ID NO: 209 - protein, 483 aa, Artificial Sequence; identical to SEQ ID NO: 203
  Description of Artificial Sequence: Synthetic polypeptide

SEQ ID NO: 210 - DNA, 1455 bp, Artificial Sequence; identical to SEQ ID NO: 204
  Description of Artificial Sequence: Synthetic polynucleotide

SEQ ID NO: 211 - protein, 451 aa, Artificial Sequence
  Description of Artificial Sequence: Synthetic polypeptide
EVQLVESGGGLVKPGGSLKLSCAASGYTFTSYVMHWVRQAPGKGLEWIGYINPYNDGTKYNEKFQGRVTISSDKSISTAYMELSSLRSEDTAMYYCARGTYYYGTRVFDYWGQGTLVTVSSASTKGPSVFPLAPSSKSTSGGTAALGCLVKDYFPEPVTVSWNSGALTSGVHTFPAVLQSSGLYSLSSVVTVPSSSLGTQTYICNVNHKPSNTKVDKKVEPKSCDKTHTCPPCPAPELLGGPSVFLFPPKPKDTLMISRTPEVTCVVVDVSHEDPEVKFNWYVDGVEVHNAKTKPREEQYNSTYRVVSVLTVLHQDWLNGKEYKCKVSNKALPAPIEKTISKAKGQPREPQVYVLPPSRDELTKNQVSLLCLVKGFYPSDIAVEWESNGQPENNYLTWPPVLDSDGSFFLYSKLTVDKSRWQQGNVFSCSVMHEALHNHYTQKSLSLSPGK

SEQ ID NO: 212 - DNA, 1359 bp, Artificial Sequence
  Description of Artificial Sequence: Synthetic polynucleotide
ggcgaggtccagctggtcgaatccggaggaggactggtgaagccaggagggagtctgaaactgtcatgcgccgctagcggctataccttcacatcttacgtcatgcactgggtgaggcaggcacctggcaagggactggaatggatcggatatattaacccatacaatgacggcactaagtataacgagaaatttcagggcagagtgaccatcagctccgataagagcatttccacagcttacatggagctgtctagtctgaggagcgaagacaccgccatgtactattgcgctcgggggacctactattacggaacaagagtgttcgattattggggacagggcaccctggtcacagtgtcaagcgcttccacaaaggggccttctgtgtttccactggcaccctcctctaaatctactagtggaggcaccgcagccctgggatgtctggtgaaggactacttcccagagcccgtcacagtgtcatggaacagcggcgcactgactagcggggtccatacctttcctgccgtgctgcagagttcaggcctgtatagcctgagctccgtggtcacagtgccatctagttcactggggactcagacctacatctgcaacgtgaatcacaagccatccaatactaaagtcgacaagaaagtggaacccaagtcttgtgataaaacacatacttgcccaccttgtcctgcaccagagctgctgggaggaccatccgtgttcctgtttccacccaagcctaaagatactctgatgattagtcgcacaccagaagtgacttgcgtggtcgtggacgtgagccacgaggaccccgaagtcaagttcaactggtacgtggacggcgtcgaggtgcataatgccaagaccaaacccagggaggaacagtataatagtacatacagagtcgtgtcagtgctgaccgtcctgcaccaggattggctgaacggcaaggagtacaagtgcaaagtgtccaataaggctctgcccgcacctatcgagaaaaccatttctaaggcaaaagggcagcctcgagaaccacaggtctatgtgctgcctccatcacgggatgagctgacaaagaaccaggtcagcctgctgtgtctggtgaaagggttctacccctctgacatcgctgtggagtgggaaagtaatggacagcctgaaaacaattatctgacttggccccctgtgctggactccgatggatctttctttctgtacagcaagctgaccgtggacaaatcccgatggcagcagggcaacgtcttttcatgtagcgtgatgcatgaggccctgcacaatcattacacccagaagtccctgtctctgagtcccggcaaatga

SEQ ID NO: 213 - protein, 219 aa, Artificial Sequence
  Description of Artificial Sequence: Synthetic polypeptide
DIVMTQSPATLSLSPGERATLSCRSSKSLQNVNGNTYLYWFQQKPGQSPQLLIYRMSNLNSGVPDRFSGSGSGTEFTLTISSLEPEDFAVYYCMQHLEYPITFGAGTKLEIKRTVAAPSVFIFPPSDEQLKSGTASVVCLLNNFYPREAKVQWKVDNALQSGNSQESVTEQDSKDSTYSLSSTLTLSKADYEKHKVYACEVTHQGLSSPVTKSFNRGEC

SEQ ID NO: 214 - DNA, 663 bp, Artificial Sequence
  Description of Artificial Sequence: Synthetic polynucleotide
ggagacattgtgatgacacagtcccctgccactctgagtctgtcaccaggcgagcgggctaccctgagttgcagaagctccaagagcctgcagaacgtgaatggaaacacatacctgtattggttccagcagaaaccaggccagtctccccagctgctgatctacaggatgtcaaatctgaacagcggagtgcctgaccgcttcagcggctccgggtctggaaccgagttcaccctgacaatttctagtctggagcccgaagatttcgcagtctactattgcatgcagcacctggagtatcctatcacctttggcgctgggacaaagctggagatcaagcgaactgtggccgctccatccgtcttcatctttcccccttctgacgagcagctgaagtccggcacagcctctgtggtctgtctgctgaacaatttctaccccagagaagcaaaggtgcagtggaaagtcgataatgccctgcagagtgggaactcacaggagagcgtgactgaacaggactccaaggattctacctatagtctgtcaagcactctgaccctgagcaaagctgactacgagaagcacaaagtgtatgcatgcgaagtcacacatcaggggctgtcctctcccgtgactaaaagctttaatcggggagagtgttga

SEQ ID NO: 215 - protein, 449 aa, Artificial Sequence
  Description of Artificial Sequence: Synthetic polypeptide
QVQLVQSGGGVVQPGRSLRLSCKASGYTFTRYTMHWVRQAPGKGLEWIGYINPSRGYTNYNQKVKDRFTISRDNSKNTAFLQMDSLRPEDTGVYFCARYYDDHYCLDYWGQGTPVTVSSASTKGPSVFPLAPSSKSTSGGTAALGCLVKDYFPEPVTVSWNSGALTSGVHTFPAVLQSSGLYSLSSVVTVPSSSLGTQTYICNVNHKPSNTKVDKKVEPKSCDKTHTCPPCPAPELLGGPSVFLFPPKPKDTLMISRTPEVTCVVVDVSHEDPEVKFNWYVDGVEVHNAKTKPREEQYNSTYRVVSVLTVLHQDWLNGKEYKCKVSNKALPAPIEKTISKAKGQPREPQVYVYPPSRDELTKNQVSLTCLVKGFYPSDIAVEWESNGQPENNYKTTPPVLDSDGSFALVSKLTVDKSRWQQGNVFSCSVMHEALHNHYTQKSLSLSPGK

SEQ ID NO: 216 - DNA, 1353 bp, Artificial Sequence
  Description of Artificial Sequence: Synthetic polynucleotide
ggacaggtccagctggtgcagagcggaggaggagtggtccagccaggacggtctctgagactgagttgcaaggcatcagggtacactttcacccgatataccatgcactgggtgcggcaggcaccagggaaaggactggaatggatcgggtacattaacccttccaggggatacacaaactataatcagaaggtgaaagacaggttcactatcagccgcgataactccaagaataccgcttttctgcagatggactctctgcgccccgaggatacaggcgtgtatttctgcgcacgatactatgacgatcactactgtctggactattggggccaggggactccagtcaccgtgagctccgcctctactaagggacccagtgtgtttccactggctccctctagtaaatccacatctggaggaactgcagctctgggatgcctggtgaaggattacttcccagagcccgtcaccgtgagttggaactcaggagctctgactagcggcgtccatacctttcccgcagtgctgcagtcaagcgggctgtacagcctgtcctctgtggtcacagtgcctagttcaagcctgggaacacagacttatatctgcaacgtgaatcacaagccttctaatactaaagtcgacaagaaagtggaaccaaagagttgtgataaaacccatacatgcccaccttgtcctgcaccagagctgctgggaggaccaagcgtgttcctgtttccacccaagcctaaagacaccctgatgattagccggacccctgaagtcacatgtgtggtcgtggacgtgagccacgaggaccccgaagtcaagttcaactggtacgtggatggcgtcgaggtgcataatgccaagacaaaacctagagaggaacagtacaattcaacctatagggtcgtgagcgtcctgacagtgctgcaccaggactggctgaacgggaaggagtataagtgcaaagtgtccaataaggcactgcccgcccctatcgagaaaaccatttctaaggcaaaaggccagcctagggaaccacaggtctacgtgtatcctccaagccgcgacgagctgacaaagaaccaggtctccctgacttgtctggtgaaaggattttacccaagtgatattgctgtggagtgggaatcaaatggccagcccgaaaacaattataagaccacaccccctgtgctggacagcgatggctccttcgccctggtctccaagctgactgtggataaatctagatggcagcaggggaacgtctttagttgttcagtgatgcatgaggctctgcacaatcattacacccagaagagcctgtccctgtctcccggcaaatga

SEQ ID NO: 217 - protein, 482 aa, Artificial Sequence
  Description of Artificial Sequence: Synthetic polypeptide
EVQLVESGGGLVKPGGSLKLSCAASGYTFTSYVMHWVRQAPGKGLEWIGYINPYNDGTKYNEKFQGRVTISSDKSISTAYMELSSLRSEDTAMYYCARGTYYYGTRVFDYWGQGTLVTVSSGGGGSGGGGSGGGGSDIVMTQSPATLSLSPGERATLSCRSSKSLQNVNGNTYLYWFQQKPGQSPQLLIYRMSNLNSGVPDRFSGSGSGTEFTLTISSLEPEDFAVYYCMQHLEYPITFGAGTKLEIKAAEPKSSDKTHTCPPCPAPEAAGGPSVFLFPPKPKDTLMISRTPEVTCVVVSVSHEDPEVKFNWYVDGVEVHNAKTKPREEQYNSTYRVVSVLTVLHQDWLNGKEYKCKVSNKALPAPIEKTISKAKGQPREPQVYVLPPSRDELTKNQVSLLCLVKGFYPSDIAVEWESNGQPENNYLTWPPVLDSDGSFFLYSKLTVDKSRWQQGNVFSCSVMHEALHNHYTQKSLSLSPGK

SEQ ID NO: 218 - DNA, 1452 bp, Artificial Sequence
  Description of Artificial Sequence: Synthetic polynucleotide
ggggaagtccagctggtcgagtctggaggaggactggtgaagccaggagggagtctgaaactgtcatgcgccgctagcgggtataccttcacaagctacgtcatgcactgggtgaggcaggcaccagggaagggactggaatggatcggctatattaatccctacaacgacgggactaagtataatgagaaatttcagggcagggtgaccatcagctccgataagtctattagtacagcctacatggagctgtctagtctgcgcagcgaagacacagcaatgtactattgcgccagggggacatactattacggaactcgcgtgttcgattactggggccaggggaccctggtcacagtgtcaagcggaggcgggggaagtggaggaggaggctcaggaggaggagggagcgacatcgtgatgacccagtcccctgctacactgtcactgagcccaggcgagcgggcaactctgtcctgtagatcctctaagtctctgcagaacgtgaatggaaacacctatctgtactggtttcagcagaaaccaggccagagcccccagctgctgatctatagaatgtccaatctgaactctggcgtgcctgataggttctccggatctggcagtgggaccgagttcaccctgaccattagttcactggagccagaagacttcgccgtgtattactgcatgcagcacctggagtaccccatcacttttggagctggcaccaagctggagatcaaggcagccgaaccaaagagctccgataaaacacatacttgcccaccttgtccagcaccagaagctgcaggaggaccaagcgtgttcctgtttccacccaagcctaaagacaccctgatgatctcccggactcccgaggtcacctgtgtggtcgtgtcagtgagccacgaggaccctgaagtcaagttcaattggtacgtggatggcgtcgaagtgcataacgctaagacaaaaccccgagaggaacagtataacagtacataccgggtcgtgtcagtgctgaccgtcctgcaccaggattggctgaatggaaaggagtacaagtgcaaagtgtctaacaaggccctgcctgctccaatcgagaaaaccattagcaaggctaaaggccagccccgcgaacctcaggtctatgtgctgcctccaagccgagatgagctgacaaagaatcaggtctccctgctgtgtctggtgaaagggttctacccttctgacattgcagtggagtgggaaagtaacggacagccagagaacaattatctgacatggccccctgtcctggactccgatggctctttctttctgtacagcaagctgactgtggacaaatccagatggcagcaggggaatgtcttttcctgttctgtgatgcatgaagccctgcacaaccattacacccagaagagtctgtcactgagccctggcaaatga

SEQ ID NO: 219 - protein, 213 aa, Artificial Sequence
  Description of Artificial Sequence: Synthetic polypeptide
DIQMTQSPSSLSASVGDRVTITCSASSSVSYMNWYQQTPGKAPKRWIYDTSKLASGVPSRFSGSGSGTDYTFTISSLQPEDIATYYCQQWSSNPFTFGQGTKLQITRTVAAPSVFIFPPSDEQLKSGTASVVCLLNNFYPREAKVQWKVDNALQSGNSQESVTEQDSKDSTYSLSSTLTLSKADYEKHKVYACEVTHQGLSSPVTKSFNRGEC

SEQ ID NO: 220 - DNA, 645 bp, Artificial Sequence
  Description of Artificial Sequence: Synthetic polynucleotide
ggggatattcagatgacccagagcccaagctccctgagtgcctcagtgggcgaccgagtcaccatcacatgctccgcttctagttcagtgtcttacatgaactggtatcagcagactccagggaaggcacccaaacggtggatctacgatacctcaaagctggccagcggagtgccctccagattcagcggctccgggtctggaacagactatacttttaccatcagctccctgcagcctgaggatattgctacttactattgccagcagtggtctagtaatccattcacttttggccaggggaccaagctgcagatcacaaggactgtggccgctcccagcgtcttcatttttccccctagcgacgagcagctgaaatctggcacagccagtgtggtctgtctgctgaacaatttctaccctcgcgaagcaaaggtgcagtggaaagtcgataacgccctgcagagtggcaacagccaggagagcgtgacagaacaggactccaaggattctacttatagtctgtcaagcaccctgacactgtccaaagctgactacgagaagcacaaagtgtatgcatgcgaagtcacccatcagggactgtcctctcctgtgacaaaatcttttaacagaggcgaatgttga

SEQ ID NO: 221 - protein, 483 aa, Artificial Sequence; identical to SEQ ID NO: 203
  Description of Artificial Sequence: Synthetic polypeptide

SEQ ID NO: 222 - DNA, 1455 bp, Artificial Sequence; identical to SEQ ID NO: 204
  Description of Artificial Sequence: Synthetic polynucleotide

SEQ ID NO: 223 - protein, 478 aa, Artificial Sequence
  Description of Artificial Sequence: Synthetic polypeptide
EVQLVESGGGLVQPGRSLRLSCAASGFTFNDYAMHWVRQAPGKGLEWVSTISWNSGSIGYADSVKGRFTISRDNAKKSLYLQMNSLRAEDTALYYCAKDIQYGNYYYGMDVWGQGTTVTVSSGGGGSGGGGSGGGGSEIVLTQSPATLSLSPGERATLSCRASQSVSSYLAWYQQKPGQAPRLLIYDASNRATGIPARFSGSGSGTDFTLTISSLEPEDFAVYYCQQRSNWPITFGQGTRLEIKAAEPKSSDKTHTCPPCPAPELLGGPSVFLFPPKPKDTLMISRTPEVTCVVVDVSHEDPEVKFNWYVDGVEVHNAKTKPREEQYNSTYRVVSVLTVLHQDWLNGKEYKCKVSNKALPAPIEKTISKAKGQPREPQVYVLPPSRDELTKNQVSLLCLVKGFYPSDIAVEWESNGQPENNYLTWPPVLDSDGSFFLYSKLTVDKSRWQQGNVFSCSVMHEALHNHYTQKSLSLSPGK

SEQ ID NO: 224 - DNA, 1440 bp, Artificial Sequence
  Description of Artificial Sequence: Synthetic polynucleotide
ggggaagtccagctggtcgagagcggaggaggactggtgcagccaggacggtccctgagactgtcttgcgccgctagtgggttcacctttaacgactatgccatgcactgggtccgacaggctccaggaaagggactggaatgggtgtctaccatcagttggaatagtggatcaattggctatgctgactccgtgaaaggcaggttcacaatctcacgcgataacgcaaagaaaagcctgtacctgcagatgaacagcctgcgcgccgaggacacagctctgtactattgcgccaaggatattcagtacgggaactactattacggaatggacgtgtgggggcagggaaccacagtcactgtgagctccggcgggggaggctcaggaggaggagggagcggaggaggaggcagcgaaatcgtgctgactcagagccctgcaaccctgagcctgtccccaggagagcgagctacactgagctgtcgggcatctcagagtgtgtctagttatctggcatggtaccagcagaagccagggcaggcccccagactgctgatctacgatgcatccaacagagccactggcatccccgcaaggttctcaggcagcgggtccggaaccgactttactctgaccatctcaagcctggagcccgaagatttcgctgtgtattactgccagcagaggtctaattggcctatcacatttggccaggggactcgcctggagattaaggcagccgaaccaaagtcctctgacaaaacacacacttgccccccttgtccagcaccagaactgctgggaggaccaagcgtgttcctgtttccacccaagcctaaagataccctgatgattagtaggacccctgaggtcacatgtgtggtcgtggacgtgagccacgaggaccccgaagtcaagtttaactggtacgtggacggcgtcgaagtgcataatgccaagacaaaaccccgcgaggaacagtataattctacctaccgagtcgtgagtgtcctgacagtgctgcatcaggattggctgaacggaaaagagtacaagtgcaaagtgtccaataaggctctgcctgcaccaatcgagaaaactatttctaaggcaaaagggcagccccgggaacctcaggtctatgtgctgcctccatccagagacgagctgaccaagaaccaggtctctctgctgtgtctggtgaaaggattctacccatcagatatcgctgtggagtgggaaagcaatggccagcccgagaacaattatctgacatggccccctgtgctggactcagatggcagcttctttctgtactctaagctgactgtggataaaagtcggtggcagcaggggaacgtcttttcttgtagtgtgatgcatgaggccctgcacaatcattacacccagaagtcactgagcctgtcccctggcaaatga

SEQ ID NO: 225 - protein, 449 aa, Artificial Sequence; identical to SEQ ID NO: 215
  Description of Artificial Sequence: Synthetic polypeptide

SEQ ID NO: 226 - DNA, 1353 bp, Artificial Sequence; identical to SEQ ID NO: 216
  Description of Artificial Sequence: Synthetic polynucleotide

SEQ ID NO: 227 - protein, 478 aa, Artificial Sequence; identical to SEQ ID NO: 223
  Description of Artificial Sequence: Synthetic polypeptide

SEQ ID NO: 228 - DNA, 1440 bp, Artificial Sequence; identical to SEQ ID NO: 224
  Description of Artificial Sequence: Synthetic polynucleotide

SEQ ID NO: 229 - protein, 213 aa, Artificial Sequence; identical to SEQ ID NO: 219
  Description of Artificial Sequence: Synthetic polypeptide

SEQ ID NO: 230 - DNA, 645 bp, Artificial Sequence; identical to SEQ ID NO: 220
  Description of Artificial Sequence: Synthetic polynucleotide

SEQ ID NO: 231 - protein, 448 aa, Artificial Sequence
  Description of Artificial Sequence: Synthetic polypeptide
QVQLVESGGGVVQPGRSLRLSCAASGFKFSGYGMHWVRQAPGKGLEWVAVIWYDGSKKYYVDSVKGRFTISRDNSKNTLYLQMNSLRAEDTAVYYCARQMGYWHFDLWGRGTLVTVSSASTKGPSVFPLAPSSKSTSGGTAALGCLVKDYFPEPVTVSWNSGALTSGVHTFPAVLQSSGLYSLSSVVTVPSSSLGTQTYICNVNHKPSNTKVDKKVEPKSCDKTHTCPPCPAPELLGGPSVFLFPPKPKDTLMISRTPEVTCVVVDVSHEDPEVKFNWYVDGVEVHNAKTKPREEQYNSTYRVVSVLTVLHQDWLNGKEYKCKVSNKALPAPIEKTISKAKGQPREPQVYVYPPSRDELTKNQVSLTCLVKGFYPSDIAVEWESNGQPENNYKTTPPVLDSDGSFALVSKLTVDKSRWQQGNVFSCSVMHEALHNHYTQKSLSLSPGK

SEQ ID NO: 232 - DNA, 1350 bp, Artificial Sequence
  Description of Artificial Sequence: Synthetic polynucleotide
gggcaggtccagctggtggaatccggaggaggagtggtccagcctggacgatctctgagactgagttgcgccgcttcagggttcaagtttagcgggtacggaatgcactgggtgaggcaggcaccaggcaaagggctggagtgggtcgccgtgatctggtatgacggcagcaagaagtactatgtcgattctgtgaagggcaggttcaccattagccgcgacaactccaaaaatacactgtacctgcagatgaactccctgagagccgaagacaccgctgtgtactattgcgccaggcagatgggctattggcacttcgatctgtggggacgaggaaccctggtcacagtgagctccgcatctacaaaggggcccagtgtgtttccactggctccctctagtaaatccacttctggaggaaccgcagcactgggatgtctggtgaaggattacttcccagagcccgtcaccgtgagttggaactcaggggctctgacctccggagtccatacatttccagcagtgctgcagtcaagcggcctgtacagcctgtcctctgtggtcactgtgcccagttcaagcctggggactcagacctatatctgcaacgtgaatcacaagccatcaaataccaaagtcgacaagaaagtggaacccaagagctgtgataaaacacatacttgcccaccttgtcctgcaccagagctgctgggaggaccaagcgtgttcctgtttccacccaagcctaaagacactctgatgatttcccggacacccgaagtgacttgcgtggtcgtggacgtgtctcacgaggaccccgaagtcaagttcaactggtacgtggatggcgtcgaggtgcataatgctaagacaaaaccccgagaggaacagtacaattcaacatatcgggtcgtgagcgtcctgactgtgctgcaccaggactggctgaacggcaaggagtataagtgcaaagtgagtaataaggctctgcccgcacctatcgagaaaaccatttctaaggctaaagggcagcctcgcgaaccacaggtctacgtgtatcctccatctcgagacgagctgactaagaaccaggtcagtctgacctgtctggtgaaagggttttaccctagcgatatcgcagtggagtgggaatccaatggacagccagaaaacaattataagaccacaccccctgtgctggacagcgatggcagcttcgcactggtcagtaagctgacagtggataaatcaagatggcagcagggcaacgtctttagttgttcagtgatgcatgaggccctgcacaatcattacactcagaagagcctgtccctgtctcctggcaaatga

SEQ ID NO: 233 - protein, 452 aa, Artificial Sequence; identical to SEQ ID NO: 205
  Description of Artificial Sequence: Synthetic polypeptide

SEQ ID NO: 234 - DNA, 1362 bp, Artificial Sequence; identical to SEQ ID NO: 206
  Description of Artificial Sequence: Synthetic polynucleotide

SEQ ID NO: 235 - protein, 214 aa, Artificial Sequence; identical to SEQ ID NO: 207
  Description of Artificial Sequence: Synthetic polypeptide

SEQ ID NO: 236 - DNA, 648 bp, Artificial Sequence; identical to SEQ ID NO: 208
  Description of Artificial Sequence: Synthetic polynucleotide

SEQ ID NO: 237 - protein, 449 aa, Artificial Sequence
  Description of Artificial Sequence: Synthetic polypeptide
QVQLVQSGGGVVQPGRSLRLSCKASGYTFTSYTMHWVRQAPGKGLEWIGYINPSSGYTKYNQKFKDRFTISADKSKSTAFLQMDSLRPEDTGVYFCARWQDYDVYFDYWGQGTPVTVSSASTKGPSVFPLAPSSKSTSGGTAALGCLVKDYFPEPVTVSWNSGALTSGVHTFPAVLQSSGLYSLSSVVTVPSSSLGTQTYICNVNHKPSNTKVDKKVEPKSCDKTHTCPPCPAPELLGGPSVFLFPPKPKDTLMISRTPEVTCVVVDVSHEDPEVKFNWYVDGVEVHNAKTKPREEQYNSTYRVVSVLTVLHQDWLNGKEYKCKVSNKALPAPIEKTISKAKGQPREPQVYVYPPSRDELTKNQVSLTCLVKGFYPSDIAVEWESNGQPENNYKTTPPVLDSDGSFALVSKLTVDKSRWQQGNVFSCSVMHEALHNHYTQKSLSLSPGK

SEQ ID NO: 238 - DNA, 1353 bp, Artificial Sequence
  Description of Artificial Sequence: Synthetic polynucleotide
gggcaggtccagctggtgcagtccggaggaggagtggtccagccaggacggtccctgagactgtcttgcaaggctagtgggtatactttcacctcttacaccatgcactgggtgcgccaggcaccagggaagggactggaatggatcgggtatattaaccctagctccggatacacaaagtacaaccagaagttcaaagaccggttcaccatctccgctgataagagtaaatcaaccgcattcctgcagatggactctctgcgacccgaggatacaggcgtgtacttctgcgcccggtggcaggactacgatgtgtattttgactactggggccaggggactccagtcaccgtgtctagtgcatcaactaagggacccagcgtgtttccactggccccctcaagcaaaagcacatccggaggaactgcagctctgggatgtctggtgaaggattatttcccagagcccgtcaccgtgtcttggaacagtggagccctgactagcggcgtccatacctttcccgctgtgctgcagtcctctgggctgtatagcctgagttcagtggtcacagtgcctagctcctctctgggaacacagacttacatctgcaacgtgaatcacaagccttcaaatactaaagtcgacaagaaagtggaaccaaagagctgtgataaaacccatacatgcccaccttgtcctgcaccagagctgctgggaggaccaagcgtgttcctgtttccacccaagcctaaagacaccctgatgatttccaggacccctgaagtcacatgcgtggtcgtggacgtgtctcacgaggaccccgaagtcaagttcaactggtacgtggatggcgtcgaggtgcataatgccaagacaaaacctagggaggaacagtataactccacctaccgcgtcgtgtctgtcctgacagtgctgcaccaggactggctgaacgggaaggagtacaagtgcaaagtgagtaataaggcactgcccgcccctatcgagaaaaccattagcaaggcaaaaggccagcctagagaaccacaggtctacgtgtatcctccatctagggacgagctgacaaagaaccaggtcagtctgacttgtctggtgaaaggattttatccaagcgatattgctgtggagtgggaatccaatggccagcccgaaaacaattacaagaccacaccccctgtgctggactcagatggcagcttcgccctggtcagtaagctgactgtggataaatcacggtggcagcaggggaacgtcttttcttgtagtgtgatgcatgaggctctgcacaatcattacacccagaagtcactgagcctgtcccccggcaaatga

SEQ ID NO: 239 - protein, 451 aa, Artificial Sequence
  Description of Artificial Sequence: Synthetic polypeptide
QVQLQQPGAELVKPGASVKMSCKASGYTFTSYNMHWVKQTPGRGLEWIGAIYPGNGDTSYNQKFKGKATLTADKSSSTAYMQLSSLTSEDSAVYYCARSTYYGGDWYFNVWGAGTTVTVSAASTKGPSVFPLAPSSKSTSGGTAALGCLVKDYFPEPVTVSWNSGALTSGVHTFPAVLQSSGLYSLSSVVTVPSSSLGTQTYICNVNHKPSNTKVDKKVEPKSCDKTHTCPPCPAPELLGGPSVFLFPPKPKDTLMISRTPEVTCVVVDVSHEDPEVKFNWYVDGVEVHNAKTKPREEQYNSTYRVVSVLTVLHQDWLNGKEYKCKVSNKALPAPIEKTISKAKGQPREPQVYVLPPSRDELTKNQVSLLCLVKGFYPSDIAVEWESNGQPENNYLTWPPVLDSDGSFFLYSKLTVDKSRWQQGNVFSCSVMHEALHNHYTQKSLSLSPGK

SEQ ID NO: 240 - DNA, 1359 bp, Artificial Sequence
  Description of Artificial Sequence: Synthetic polynucleotide
ggacaggtccagctgcagcagcccggagctgaactggtcaaacctggcgcatccgtgaaaatgtcttgcaaggctagtggctacacattcacttcctataacatgcactgggtgaagcagacaccaggacgaggactggagtggatcggagcaatctaccctggaaacggcgacacttcttataatcagaagtttaaaggcaaggccaccctgacagctgataagagctcctctaccgcctacatgcagctgagttcactgacaagtgaagactcagcagtgtactattgcgccagaagcacctactatggcggggattggtacttcaacgtgtggggggcaggaaccacagtcaccgtgagcgccgcttccacaaaaggaccaagcgtgtttccactggcaccaagctccaagtcaaccagcggaggaacagcagccctgggatgtctggtgaaggactacttcccagagcccgtcaccgtgtcttggaacagtggcgccctgacaagcggggtccatacttttcccgctgtgctgcagtctagtggcctgtacagcctgtcaagcgtggtcaccgtcccttcctctagtctggggactcagacctatatctgcaacgtgaatcacaaaccttctaatacaaaggtcgacaagaaagtggaaccaaaaagttgtgataagacacatacttgcccaccttgtcctgcaccagagctgctgggaggaccatccgtgttcctgtttccacccaaacccaaggacactctgatgattagccggactcctgaagtcacctgcgtggtcgtggacgtgagccacgaggaccccgaagtcaaattcaactggtacgtggatggcgtcgaggtgcataatgccaaaacaaagccccgggaggaacagtacaactcaacatatagagtcgtgagcgtcctgactgtgctgcaccaggactggctgaacggcaaggagtataaatgcaaggtgtccaacaaggccctgcccgcacctatcgagaagactatttctaaagccaagggccagcctagggaaccacaggtgtacgtgctgcctccaagccgcgacgagctgactaaaaaccaggtctccctgctgtgtctggtgaaggggttctatccaagtgatatcgctgtggagtgggaatcaaatggacagcccgagaacaattacctgacttggccccctgtgctggactcagatgggagcttctttctgtattccaaactgaccgtggataagtctcggtggcagcagggaaatgtcttttcctgttctgtgatgcacgaagcactgcacaatcactacacccagaagtccctgagcctgtcacccggcaaatga

SEQ ID NO: 241 - protein, 213 aa, Artificial Sequence
  Description of Artificial Sequence: Synthetic polypeptide
QIVLSQSPAILSASPGEKVTMTCRASSSVSYIHWFQQKPGSSPKPWIYATSNLASGVPVRFSGSGSGTSYSLTISRVEAEDAATYYCQQWTSNPPTFGGGTKLEIKRTVAAPSVFIFPPSDEQLKSGTASVVCLLNNFYPREAKVQWKVDNALQSGNSQESVTEQDSKDSTYSLSSTLTLSKADYEKHKVYACEVTHQGLSSPVTKSFNRGEC

SEQ ID NO: 242 - DNA, 645 bp, Artificial Sequence
  Description of Artificial Sequence: Synthetic polynucleotide
gggcagattgtcctgtctcagagtcccgctatcctgtcagcaagccctggggagaaggtgaccatgacatgccgagccagctcctctgtcagctacatccactggttccagcagaagccaggcagttcacctaaaccatggatctacgccacatctaacctggctagtggagtgcccgtccggttttccggctctgggagtggaacatcatacagcctgactatttccagagtggaggccgaagacgccgctacctactattgccagcagtggacctctaatccccctacattcggcgggggaactaagctggagatcaaaaggactgtggcagccccttctgtcttcatttttccacccagtgacgaacagctgaaatcaggaaccgcttccgtggtctgtctgctgaacaacttctacccccgcgaggcaaaggtgcagtggaaagtcgataacgccctgcagtccggcaattctcaggagagtgtgaccgaacaggactcaaaggatagcacatattccctgagctccactctgaccctgtccaaagctgattacgaaaagcataaagtgtatgcatgtgaggtcacccaccaggggctgagtagtcccgtcacaaagagtttcaatagaggagagtgttga

SEQ ID NO: 243 - protein, 449 aa, Artificial Sequence; identical to SEQ ID NO: 237
  Description of Artificial Sequence: Synthetic polypeptide

SEQ ID NO: 244 - DNA, 1353 bp, Artificial Sequence; identical to SEQ ID NO: 238
  Description of Artificial Sequence: Synthetic polynucleotide

SEQ ID NO: 245 - protein, 452 aa, Artificial Sequence
  Description of Artificial Sequence: Synthetic polypeptide
QAYLQQSGAELVRPGASVKMSCKASGYTFTSYNMHWVKQTPRQGLEWIGAIYPGNGDTSYNQKFKGKATLTVDKSSSTAYMQLSSLTSEDSAVYFCARVVYYSNSYWYFDVWGTGTTVTVSSASTKGPSVFPLAPSSKSTSGGTAALGCLVKDYFPEPVTVSWNSGALTSGVHTFPAVLQSSGLYSLSSVVTVPSSSLGTQTYICNVNHKPSNTKVDKKVEPKSCDKTHTCPPCPAPELLGGPSVFLFPPKPKDTLMISRTPEVTCVVVDVSHEDPEVKFNWYVDGVEVHNAKTKPREEQYNSTYRVVSVLTVLHQDWLNGKEYKCKVSNKALPAPIEKTISKAKGQPREPQVYVLPPSRDELTKNQVSLLCLVKGFYPSDIAVEWESNGQPENNYLTWPPVLDSDGSFFLYSKLTVDKSRWQQGNVFSCSVMHEALHNHYTQKSLSLSPGK

SEQ ID NO: 246 - DNA, 1362 bp, Artificial Sequence
  Description of Artificial Sequence: Synthetic polynucleotide
ggacaggcttacctgcagcagtccggagcagaactggtccgaccaggagcttccgtgaaaatgtcttgcaaagcaagtggctacactttcaccagctataacatgcactgggtgaaacagacacctcgacagggactggagtggatcggagcaatctacccagggaacggagacactagctataatcagaagtttaaagggaaggctacactgactgtggataagagctcctctactgcatacatgcagctgagttcactgaccagcgaagactccgctgtgtatttctgcgcaagggtggtctactactccaattcttactggtacttcgatgtgtggggcactgggaccacagtcaccgtgagctccgcctcaaccaaaggacctagcgtgttcccactggctccctctagtaagagtacatcaggaggaactgcagctctgggatgtctggtgaaggactacttcccagagcccgtcacagtgtcttggaacagtggggcactgacatctggagtccatacttttcctgccgtgctgcagtcaagcgggctgtacagcctgtcctctgtggtcactgtgccaagttcaagcctgggaacccagacatatatctgcaacgtgaatcacaaaccaagcaataccaaggtcgacaagaaagtggaacccaaatcctgtgataagactcatacctgcccaccttgtcctgcaccagagctgctgggaggaccatccgtgttcctgtttccacccaaacctaaggacaccctgatgatttctagaaccccagaagtcacatgcgtggtcgtggacgtgagccacgaggaccccgaagtcaagtttaactggtacgtggatggcgtcgaggtgcataatgctaaaacaaagccccgggaggaacagtacaactccacctatagagtcgtgtctgtcctgacagtgctgcaccaggactggctgaacgggaaggagtataaatgcaaggtgagcaacaaggcactgcccgcccctatcgagaagacaatttccaaagctaagggacagcctagggaaccacaggtctacgtgctgcctccatctcgcgacgagctgactaaaaaccaggtcagtctgctgtgtctggtgaagggattctatcccagcgatatcgcagtggagtgggaatccaatggccagcctgaaaacaattacctgacctggccccctgtgctggactcagatggcagcttctttctgtatagtaaactgacagtggataagtcacgctggcagcaggggaacgtctttagctgttccgtgatgcatgaggccctgcacaatcattacacccagaaatctctgagtctgtcacccggcaagtga

SEQ ID NO: 247 - protein, 213 aa, Artificial Sequence
  Description of Artificial Sequence: Synthetic polypeptide
QIVLSQSPAILSASPGEKVTMTCRASSSVSYMHWYQQKPGSSPKPWIYAPSNLASGVPARFSGSGSGTSYSLTISRVEAEDAATYYCQQWSFNPPTFGAGTKLELKRTVAAPSVFIFPPSDEQLKSGTASVVCLLNNFYPREAKVQWKVDNALQSGNSQESVTEQDSKDSTYSLSSTLTLSKADYEKHKVYACEVTHQGLSSPVTKSFNRGEC

SEQ ID NO: 248 - DNA, 645 bp, Artificial Sequence
  Description of Artificial Sequence: Synthetic polynucleotide
ggacagatcgtcctgtcacagagccccgctatcctgtccgcatctcctggcgagaaggtgaccatgacatgccgagctagctcctctgtctcctacatgcactggtatcagcagaagcccgggagttcacctaaaccatggatctacgccccatcaaacctggctagcggagtgccagcacggttcagtggctcagggagcggaacatcctattctctgactatttctagagtggaggctgaagacgccgctacctactattgccagcagtggtccttcaatccccctacctttggcgcagggacaaagctggagctgaaaaggaccgtggcagcccctagtgtcttcatttttccaccctccgacgaacagctgaagtccggcacagcctctgtggtctgtctgctgaacaatttctacccacgcgaggccaaggtgcagtggaaagtcgataacgctctgcagagtggcaacagccaggagagcgtgactgaacaggactccaaggattctacctatagtctgagctccactctgaccctgagcaaagcagattacgagaagcacaaagtgtatgcctgcgaagtcacacatcagggactgtctagtcctgtgactaaaagctttaacagaggcgaatgttga

SEQ ID NO: 249 - protein, 450 aa, Artificial Sequence
  Description of Artificial Sequence: Synthetic polypeptide
EVQLVESGGGLVQPGGSLRLSCAASGFNIKDTYIHWVRQAPGKGLEWVARIYPTNGYTRYADSVKGRFTISADTSKNTAYLQMNSLRAEDTAVYYCSRWGGDGFYAMDYWGQGTLVTVSSASTKGPSVFPLAPSSKSTSGGTAALGCLVKDYFPEPVTVSWNSGALTSGVHTFPAVLQSSGLYSLSSVVTVPSSSLGTQTYICNVNHKPSNTKVDKKVEPKSCDKTHTCPPCPAPELLGGPSVFLFPPKPKDTLMISRTPEVTCVVVDVSHEDPEVKFNWYVDGVEVHNAKTKPREEQYNSTYRVVSVLTVLHQDWLNGKEYKCKVSNKALPAPIEKTISKAKGQPREPQVYVYPPSRDELTKNQVSLTCLVKGFYPSDIAVEWESNGQPENNYKTTPPVLDSDGSFALVSKLTVDKSRWQQGNVFSCSVMHEALHNHYTQKSLSLSPGK

SEQ ID NO: 250 - DNA, 1353 bp, Artificial Sequence
  Description of Artificial Sequence: Synthetic polynucleotide
gaggtgcagctggtggaaagcggaggaggactggtgcagccaggaggatctctgcgactgagttgcgccgcttcaggattcaacatcaaggacacctacattcactgggtgcgacaggctccaggaaaaggactggagtgggtggctcgaatctatcccactaatggatacacccggtatgccgactccgtgaaggggaggtttactattagcgccgatacatccaaaaacactgcttacctgcagatgaacagcctgcgagccgaagataccgctgtgtactattgcagtcgatggggaggagacggattctacgctatggattattggggacaggggaccctggtgacagtgagctccgcctctaccaagggccccagtgtgtttcccctggctccttctagtaaatccacctctggagggacagccgctctgggatgtctggtgaaggactatttccccgagcctgtgaccgtgagttggaactcaggcgccctgacaagcggagtgcacacttttcctgctgtgctgcagtcaagcgggctgtactccctgtcctctgtggtgacagtgccaagttcaagcctgggcacacagacttatatctgcaacgtgaatcataagccctcaaatacaaaagtggacaagaaagtggagcccaagagctgtgataagacccacacctgccctccctgtccagctccagaactgctgggaggacctagcgtgttcctgtttccccctaagccaaaagacactctgatgatttccaggactcccgaggtgacctgcgtggtggtggacgtgtctcacgaggaccccgaagtgaagttcaactggtacgtggatggcgtggaagtgcataatgctaagacaaaaccaagagaggaacagtacaactccacttatcgcgtcgtgagcgtgctgaccgtgctgcaccaggactggctgaacgggaaggagtataagtgcaaagtcagtaataaggccctgcctgctccaatcgaaaaaaccatctctaaggccaaaggccagccaagggagccccaggtgtacgtgtacccacccagcagagacgaactgaccaagaaccaggtgtccctgacatgtctggtgaaaggcttctatcctagtgatattgctgtggagtgggaatcaaatggacagccagagaacaattacaagaccacacctccagtgctggacagcgatggcagcttcgccctggtgtccaagctgacagtggataaatctcgatggcagcaggggaacgtgtttagttgttcagtgatgcatgaagccctgcacaatcattacactcagaagagcctgtccctgtctcccggcaaatga

SEQ ID NO: 251 - protein, 450 aa, Artificial Sequence
  Description of Artificial Sequence: Synthetic polypeptide
EVQLVESGGGLVQPGGSLRLSCAASGFNIKDTYIHWVRQAPGKGLEWVARIYPTNGYTRYADSVKGRFTISADTSKNTAYLQMNSLRAEDTAVYYCSRWGGDGFYAMDYWGQGTLVTVSSASTKGPSVFPLAPSSKSTSGGTAALGCLVKDYFPEPVTVSWNSGALTSGVHTFPAVLQSSGLYSLSSVVTVPSSSLGTQTYICNVNHKPSNTKVDKKVEPKSCDKTHTCPPCPAPELLGGPSVFLFPPKPKDTLMISRTPEVTCVVVDVSHEDPEVKFNWYVDGVEVHNAKTKPREEQYNSTYRVVSVLTVLHQDWLNGKEYKCKVSNKALPAPIEKTISKAKGQPREPQVYVLPPSRDELTKNQVSLLCLVKGFYPSDIAVEWESNGQPENNYLTWPPVLDSDGSFFLYSKLTVDKSRWQQGNVFSCSVMHEALHNHYTQKSLSLSPGK

SEQ ID NO: 252 - DNA, 1353 bp, Artificial Sequence
  Description of Artificial Sequence: Synthetic polynucleotide
gaggtgcagctggtggaaagcggaggaggactggtgcagccaggaggatctctgcgactgagttgcgccgcttcaggattcaacatcaaggacacctacattcactgggtgcgacaggctccaggaaaaggactggagtgggtggctcgaatctatcccactaatggatacacccggtatgccgactccgtgaaggggaggtttactattagcgccgatacatccaaaaacactgcttacctgcagatgaacagcctgcgagccgaagataccgctgtgtactattgcagtcgatggggaggagacggattctacgctatggattattggggacaggggaccctggtgacagtgagctccgcctctaccaagggccccagtgtgtttcccctggctccttctagtaaatccacctctggagggacagccgctctgggatgtctggtgaaggactatttccccgagcctgtgaccgtgagttggaactcaggcgccctgacaagcggagtgcacacttttcctgctgtgctgcagtcaagcgggctgtactccctgtcctctgtggtgacagtgccaagttcaagcctgggcacacagacttatatctgcaacgtgaatcataagccctcaaatacaaaagtggacaagaaagtggagcccaagagctgtgataagacccacacctgccctccctgtccagctccagaactgctgggaggacctagcgtgttcctgtttccccctaagccaaaagacactctgatgatttccaggactcccgaggtgacctgcgtggtggtggacgtgtctcacgaggaccccgaagtgaagttcaactggtacgtggatggcgtggaagtgcataatgctaagacaaaaccaagagaggaacagtacaactccacttatcgcgtcgtgagcgtgctgaccgtgctgcaccaggactggctgaacgggaaggagtataagtgcaaagtcagtaataaggccctgcctgctccaatcgaaaaaaccatctctaaggccaaaggccagccaagggagccccaggtgtacgtgctgccacccagcagagacgaactgaccaagaaccaggtgtccctgctgtgtctggtgaaaggcttctatcctagtgatattgctgtggagtgggaatcaaatggacagccagagaacaattacctgacctggcctccagtgctggacagcgatggcagcttcttcctgtattccaagctgacagtggataaatctcgatggcagcaggggaacgtgtttagttgttcagtgatgcatgaagccctgcacaatcattacactcagaagagcctgtccctgtctcccggcaaatga

SEQ ID NO: 253 - protein, 214 aa, Artificial Sequence
  Description of Artificial Sequence: Synthetic polypeptide
DIQMTQSPSSLSASVGDRVTITCRASQDVNTAVAWYQQKPGKAPKLLIYSASFLYSGVPSRFSGSRSGTDFTLTISSLQPEDFATYYCQQHYTTPPTFGQGTKVEIKRTVAAPSVFIFPPSDEQLKSGTASVVCLLNNFYPREAKVQWKVDNALQSGNSQESVTEQDSKDSTYSLSSTLTLSKADYEKHKVYACEVTHQGLSSPVTKSFNRGEC

SEQ ID NO: 254 - DNA, 645 bp, Artificial Sequence
  Description of Artificial Sequence: Synthetic polynucleotide
gacatccagatgacccagtctccatcctccctgtctgcatctgtaggagacagagtcaccatcacttgccgggcaagtcaggacgttaacaccgctgtagcttggtatcagcagaaaccagggaaagcccctaagctcctgatctattctgcatcctttttgtacagtggggtcccatcaaggttcagtggcagtcgatctgggacagatttcactctcaccatcagcagtctgcaacctgaagattttgcaacttactactgtcaacagcattacactaccccacccactttcggccaagggaccaaagtggagatcaaacgaactgtggctgcaccatctgtcttcatcttcccgccatctgatgagcagttgaaatctggaactgcctctgttgtgtgcctgctgaataacttctatcccagagaggccaaagtacagtggaaggtggataacgccctccaatcgggtaactcccaagagagtgtcacagagcaggacagcaaggacagcacctacagcctcagcagcaccctgacgctgagcaaagcagactacgagaaacacaaagtctacgcctgcgaagtcacccatcagggcctgagctcgcccgtcacaaagagcttcaacaggggagagtgttga

SEQ ID NO: 255 - DNA, 1563 bp, Artificial Sequence; identical to SEQ ID NO: 199
  Description of Artificial Sequence: Synthetic polynucleotide

SEQ ID NO: 256 - protein, 518 aa, Artificial Sequence [sequence omitted]

SEQ ID NO: 257 - DNA, 3381 bp, Artificial Sequence
  Description of Artificial Sequence: Synthetic polynucleotide
gaattcgcgaccatggccgtgatggctcctcggacactggtgctgctgctgagtggggctctggctctgacacagacttgggctggacaggtgcagctgcaggagtccggaggaggactggtgaagccaggagggtccctgagactgtcttgcgccgctagtggcttcacctttagctcctactggatgtcttgggtgaggcaggcacctggcaagggactggagtgggtggcaaacatcaatcgcgacggatcagccagctactatgtggatagcgtcaagggcaggtttacaattagtcgcgacgatgctaaaaactcactgtacctgcagatgaatagcctgcgggcagaggatactgccgtgtactattgcgccagagacaggggagtcggctatttcgatctgtgggggagaggaactctggtgaccgtctctagtgctagcaccggaggcgggggatctggcggaggaggcagtggaggaggagggtcccagtctgctctgacacagccagcaagtgtgtcaggcagccccgggcagtcaatcactattagctgtactggcacctcaagcgacgtgggaggctacaactttgtcagctggtatcagcagcaccctggaaaagccccaaagctgatgatctacgacgtgagcgatcgaccttccggcgtctctgatcggttctccgggtctaagagtggaaatactgcctccctgatcatttctgggctgcaggctgacgatgaggcagactactattgctcctcttatggaagttcaagcacccatgtgatcttcgggggaggcacaaaagtgactgtcctgggcgcagcctcagatgctcacaaaagcgaggtggcacatcggttcaaggacctgggggaggaaaactttaaagccctggtgctgattgcattcgcccagtacctgcagcagagcccatttgaggaccacgtgaagctggtcaacgaggtgaccgagttcgccaaaacatgcgtggccgacgagtccgctgaaaattgtgataagtctctgcatactctgtttggagataaactgtgcaccgtggccacactgcgagagacctacggcgaaatggcagactgctgtgccaagcaggagccagaaagaaacgagtgcttcctgcagcacaaagacgataacccaaatctgccacgactggtgcgaccagaagtggacgtcatgtgtactgctttccacgataatgaggaaacctttctgaagaaatacctgtatgagatcgcccggagacatccctacttttatgcacctgaactgctgttctttgccaaaagatacaaggctgcattcaccgagtgctgtcaggccgctgataaagcagcctgcctgctgccaaagctggacgagctgcgagatgaaggcaaggcctcctctgctaaacagagactgaagtgtgccagcctgcagaaattcggcgagagggcttttaaggcttgggcagtggcacgactgtcccagagattccctaaggcagagtttgccgaagtctctaaactggtgactgacctgaccaaggtgcacaccgagtgctgtcatggcgacctgctggaatgcgccgacgatcgcgctgatctggcaaagtacatctgtgagaaccaggacagcattagttcaaagctgaaagagtgctgtgaaaaacccctgctggagaagagccactgcatcgcagaggtggaaaacgacgaaatgcccgccgatctgcctagtctggctgcagacttcgtggagtcaaaagatgtctgtaagaattacgctgaagcaaaggatgtgttcctgggcatgtttctgtacgagtatgctaggcgccacccagactactccgtggtcctgctgctgaggctggccaagacctatgagaccacactggaaaaatgctgtgccgctgcagatccccatgagtgctatgccaaagtgttcgacgagttcaagccactggtcgaggaaccccagaacctgattaagcagaattgtgagctgtttgaacagctgggcgagtacaaattccagaacgccctgctggtgcgctatacaaagaaagtccctcaggtgagcacaccaactctggtggaagtctccaggaatctgggaaaggtcggctctaaatgctgtaagcaccccgaggccaaacgcatgccttgcgctgaagattacctgtccgtggtcctgaaccagctgtgtgtgctgcatgagaagaccccagtctctgaccgggtgacaaaatgctgtactgaaagtctggtgaatcgacggccctgctttagcgccctggaggtggatgaaacatatgtccctaaggagttccaggctgaaaccttcacatttcacgcagacatctgtactctgtccgagaaagaaagacagattaagaaacagaccgccctggtcgagctggtgaagcataaacccaaggccacaaaagaacagctgaaggctgtgatggacgatttcgccgcttttgtcgagaaatgctgtaaggctgacgataaggaaacttgctttgcagaggaagggaagaaactggtggcagcatcccaggctgcactgggactggcagctgcactgcaggtccagctggtgcagtctggcgccgaggtgaagaaacctggggaaagtctgaaaatctcctgtaagggcagtgggtactcattcaccagctattggattgcctgggtgaggcagatgccaggaaagggcctggagtacatgggactgatctatcctggcgacagcgatacaaaatactcaccaagctttcagggccaggtcacaattagcgtggataagtccgtctctactgcctatctgcagtggagctccctgaaacctagtgactcagccgtgtacttctgcgctcgccacgacgtcggctattgcacagatcgaacttgtgccaagtggccagagtggctgggagtgtggggacagggaaccctggtgacagtctctagtgggggaggcgggtcaagcggaggagggtccggaggaggaggaagccagtccgtgctgacccagcccccttctgtcagtgccgctcctggccagaaggtgacaatctcatgcagcgggtcctctagtaacattggaaacaattacgtgagctggtatcagcagctgccagggaccgctcccaagctgctgatctacgatcatacaaatagacctgcaggagtgccagacaggttttccggctctaaaagtgggacctcagccagcctggctattagcggcttccggtccgaggacgaagcagattactattgtgcctcctgggactatacactgtctggctgggtgttcggcgggggaactaagctgaccgtcctggggtgaggatcc

SEQ ID NO: 258 - protein, 1124 aa, Artificial Sequence [sequence omitted]

SEQ ID NO: 259 - DNA, 1860 bp, Artificial Sequence
  Description of Artificial Sequence: Synthetic polynucleotide
gaattcgcgaccatggccgtgatggctcctagaacactggtgctgctgctgtccggggctctggctctgactcagacttgggctgggcaggtgcagctgcaggagagcggaggaggactggtgaaaccaggagggtctctgcgactgagttgcgcagcttcaggcttcacctttagctcctactggatgtcctgggtccgacaggcacctgggaagggactggaatgggtggccaacatcaatcgggacggaagcgcttcctactatgtggatagcgtcaaaggccgctttaccattagtcgagacgatgctaagaactcactgtacctgcagatgaatagcctgcgcgctgaggatacagcagtctactattgcgcaagggaccgaggagtgggatatttcgatctgtggggacgaggcactctggtgaccgtctctagtgccagcacaggcggaggaggatcaggaggaggaggcagcggaggaggcgggtctcagagtgccctgactcagccagcttcagtgagcgggtcccccggacagagcatcaccatttcctgtaccggcacatcaagcgacgtcggaggctacaactttgtgtcctggtatcagcagcacccaggaaaggcccccaaactgatgatctacgacgtctctgatcggcctagcggcgtgtccgatagattctctggcagtaagtcagggaatactgcctctctgatcattagtggcctgcaggccgacgatgaggctgactactattgctcctcttatgggagttcaagcacccatgtgatctttgggggaggcacaaaagtgactgtcctggggggaggctccgatgcacacaagtctgaggtcgcccataggttcaaagacctgggcgaggaaaactttaaggccctggtgctgattgctttcgcacagtacctgcagcagtgcccatttgaagatcacgtgaaactggtcaacgaggtgacagagttcgccaagacttgcgtggcagacgagtccgccgaaaattgtgataaatctctgcatacactgtttggggataagctgtgtaccgtggccacactgagagagacttatggagaaatggctgactgctgtgcaaaacaggagcctgaaaggaacgagtgcttcctgcagcacaaggacgataaccccaatctgcctcgactggtgcggccagaagtggacgtcatgtgtaccgctttccacgataatgaggaaacatttctgaagaaatacctgtatgagatcgcccggagacatccctacttttatgctcctgaactgctgttctttgcaaagcgctacaaagcagccttcacagagtgctgtcaggctgcagataaggccgcttgcctgctgccaaaactggacgagctgagggatgaagggaaagcttcctctgcaaagcagcgcctgaaatgtgcatccctgcagaagttcggcgagcgggcctttaaagcctgggctgtggcaagactgtcccagaggttccccaaggccgagtttgctgaagtctctaagctggtgactgacctgaccaaagtgcacactgagtgctgtcatggcgacctgctggaatgcgccgacgatagagcagatctggccaagtacatctgtgagaatcaggacagcattagttcaaagctgaaagagtgctgtgaaaagcccctgctggagaaaagccactgcattgctgaggtggaaaacgacgaaatgcctgcagatctgccaagtctggcagccgacttcgtcgagagcaaggatgtgtgtaaaaattatgccgaagctaaggacgtgttcctgggcatgtttctgtacgagtatgcaagagcctgaggatcc

SEQ ID NO: 260 - protein, 617 aa, Artificial Sequence
  Description of Artificial Sequence: Synthetic polypeptide
EFATMAVMAPRTLVLLLSGALALTQTWAGQVQLQESGGGLVKPGGSLRLSCAASGFTFSSYWMSWVRQAPGKGLEWVANINRDGSASYYVDSVKGRFTISRDDAKNSLYLQMNSLRAEDTAVYYCARDRGVGYFDLWGRGTLVTVSSASTGGGGSGGGGSGGGGSQSALTQPASVSGSPGQSITISCTGTSSDVGGYNFVSWYQQHPGKAPKLMIYDVSDRPSGVSDRFSGSKSGNTASLIISGLQADDEADYYCSSYGSSSTHVIFGGGTKVTVLGGGSDAHKSEVAHRFKDLGEENFKALVLIAFAQYLQQCPFEDHVKLVNEVTEFAKTCVADESAENCDKSLHTLFGDKLCTVATLRETYGEMADCCAKQEPERNECFLQHKDDNPNLPRLVRPEVDVMCTAFHDNEETFLKKYLYEIARRHPYFYAPELLFFAKRYKAAFTECCQAADKAACLLPKLDELRDEGKASSAKQRLKCASLQKFGERAFKAWAVARLSQRFPKAEFAEVSKLVTDLTKVHTECCHGDLLECADDRADLAKYICENQDSISSKLKECCEKPLLEKSHCIAEVENDEMPADLPSLAADFVESKDVCKNYAEAKDVFLGMFLYEYARA

SEQ ID NO: 261 - DNA, 1605 bp, Artificial Sequence
  Description of Artificial Sequence: Synthetic polynucleotide
gaattcgcgaccatggctgtgatggctcctcgaaccctggtgctgctgctgtccggcgctctggctctgactcagacttgggctggctccgtggtgctgctgctgaggctggccaaaacctacgagaccacactggaaaagtgctgtgccgctgcagaccctcacgagtgctatgctaaagtcttcgatgagttcaagcccctggtggaggaacctcagaacctgatcaaacagaattgtgagctgttcgaacagctgggcgagtacaagtttcagaacgccctgctggtgcgctataccaagaaagtgccacaggtcagcactcccaccctggtggaggtctccagaaatctggggaaagtgggatctaaatgctgtaagcaccctgaggcaaagaggatgccatgcgccgaagactacctgagcgtggtcctgaaccagctgtgtgtgctgcatgagaaaaccccagtgtccgatcgcgtcaccaagtgctgtacagaaagcctggtgaaccggagaccatgcttctccgccctggaggtcgacgaaacatacgtgcccaaggagtttaatgctgaaacattcactttccacgcagatatctgtaccctgagcgagaaggaacgacagattaagaaacagacagccctggtggagctggtcaagcataaacccaaggccaccaaagaacagctgaaggctgtcatggacgatttcgccgcttttgtggagaaatgctgtaaggcagacgataaggaaacatgcttcgccgaggaaggcaagaaactggtggcagcatcccaggctgcactgggactgggagggagtggacaggtgcagctggtccagagcggagcagaggtgaagaaacccggcgaatcactgaaaatcagctgtaaggggtccggatactcttttactagttattggattgcctgggtgcggcagatgcctggcaaagggctggagtacatggggctgatctatcccggagactctgatacaaagtactcacctagcttccagggccaagtgactattagcgtcgacaaatccgtgtctaccgcttatctgcagtggagctccctgaagcctagtgattcagctgtctacttttgcgcacgacacgacgtgggctattgcaccgatcggacatgtgccaagtggccagagtggctgggagtgtggggacagggaactctggtgaccgtctctagtggaggcgggggatcaagcggaggaggatctggaggaggaggcagccagtccgtcctgactcagccaccttctgtgagtgcagctccaggacagaaggtgaccatctcatgcagcggctcctctagtaacattgggaacaattacgtgagctggtatcagcagctgccaggaacagctcccaaactgctgatctacgaccatactaataggcctgcaggcgtgccagatcgcttctccggctctaagagtgggacatcagcaagcctggccatttccggctttagatctgaggacgaagccgattactattgtgctagttgggactatactctgtcagggtgggtcttcgggggaggcacaaagctgactgtgctgggatgaggatcc

SEQ ID NO: 262 - protein, 532 aa, Artificial Sequence
  Description of Artificial Sequence: Synthetic polypeptide
EFATMAVMAPRTLVLLLSGALALTQTWAGSVVLLLRLAKTYETTLEKCCAAADPHECYAKVFDEFKPLVEEPQNLIKQNCELFEQLGEYKFQNALLVRYTKKVPQVSTPTLVEVSRNLGKVGSKCCKHPEAKRMPCAEDYLSVVLNQLCVLHEKTPVSDRVTKCCTESLVNRRPCFSALEVDETYVPKEFNAETFTFHADICTLSEKERQIKKQTALVELVKHKPKATKEQLKAVMDDFAAFVEKCCKADDKETCFAEEGKKLVAASQAALGLGGSGQVQLVQSGAEVKKPGESLKISCKGSGYSFTSYWIAWVRQMPGKGLEYMGLIYPGDSDTKYSPSFQGQVTISVDKSVSTAYLQWSSLKPSDSAVYFCARHDVGYCTDRTCAKWPEWLGVWGQGTLVTVSSGGGGSSGGGSGGGGSQSVLTQPPSVSAAPGQKVTISCSGSSSNIGNNYVSWYQQLPGTAPKLLIYDHTNRPAGVPDRFSGSKSGTSASLAISGFRSEDEADYYCASWDYTLSGWVFGGGTKLTVLG

SEQ ID NO: 263 - DNA, 1845 bp, Artificial Sequence
  Description of Artificial Sequence: Synthetic polynucleotide
gaattcgcgaccatggctgtgatggctcctagaaccctggtgctgctgctgtccggcgctctggctctgactcagacctgggctggggatatcaaactgcagcagtctggagctgagctggcacgaccaggagccagtgtcaaaatgtcatgcaagactagcggctacaccttcaccagatataccatgcactgggtgaagcagaggccaggacagggactggaatggatcggatatattaaccccagccgcggctacacaaactataatcagaagttcaaagacaaggctacactgaccacagataagagctcctctactgcatacatgcagctgagttcactgaccagcgaggattccgccgtgtactattgcgctaggtactatgacgatcattactgtctggactattggggacagggcactaccctgactgtgagctccgtcgaaggagggtctggaggcagtggaggatcaggagggagcggaggagtggacgatatccagctgacccagagccccgccattatgagtgcttcacctggcgagaaggtcaccatgacatgccgcgcctctagttcagtgtcctacatgaattggtatcagcagaaatccggcacatctcctaagcggtggatctacgatacttccaaagtcgcctctggggtgccatatcggttcagcgggtccggatctggcaccagttactcactgacaattagctccatggaggctgaagacgccgctacctactattgtcagcagtggtctagtaaccctctgactttcggggccggaaccaaactggagctgaaggggggaagtgatgcacacaaatcagaagtcgcccataggttcaaggacctgggcgaggaaaattttaaagccctggtgctgatcgctttcgcacagtatctgcagcagtgcccatttgaggatcacgtgaagctggtcaacgaggtgacagagttcgccaaaacttgcgtcgcagacgagagcgccgaaaattgtgataagtccctgcataccctgtttggggataaactgtgtactgtggccaccctgagggagacatacggagaaatggctgactgctgtgcaaagcaggagcccgaacgcaacgagtgcttcctgcagcacaaagacgataaccccaatctgcctaggctggtgcgccctgaagtggacgtcatgtgtaccgctttccacgataatgaggaaacatttctgaagaaatacctgtatgagattgcccggagacatccttacttttatgctccagaactgctgttctttgcaaaacggtacaaggcagccttcacagagtgctgtcaggctgcagataaagccgcttgcctgctgccaaagctggacgagctgcgcgatgaaggaaaggcctcaagcgctaaacagcgactgaagtgtgcctccctgcagaaattcggcgagcgggcttttaaggcatgggctgtggcacgactgagccagcggttccccaaggcagagtttgccgaagtctccaaactggtgacagacctgactaaggtgcacaccgagtgctgtcatggggacctgctggaatgcgccgacgatagagctgatctggcaaagtatatctgtgagaaccaggactctatttcctctaaactgaaggagtgctgtgaaaaacctctgctggagaagagccactgcatcgcagaggtggaaaacgacgaaatgccagccgatctgccctctctggcagccgacttcgtcgagagtaaagatgtgtgtaagaattacgccgaagctaaggacgtgttcctgggcatgtttctgtacgagtatgcaagagcctgaggatcc

SEQ ID NO: 264 - protein, 612 aa, Artificial Sequence
  Description of Artificial Sequence: Synthetic polypeptide
EFATMAVMAPRTLVLLLSGALALTQTWAGDIKLQQSGAELARPGASVKMSCKTSGYTFTRYTMHWVKQRPGQGLEWIGYINPSRGYTNYNQKFKDKATLTTDKSSSTAYMQLSSLTSEDSAVYYCARYYDDHYCLDYWGQGTTLTVSSVEGGSGGSGGSGGSGGVDDIQLTQSPAIMSASPGEKVTMTCRASSSVSYMNWYQQKSGTSPKRWIYDTSKVASGVPYRFSGSGSGTSYSLTISSMEAEDAATYYCQQWSSNPLTFGAGTKLELKGGSDAHKSEVAHRFKDLGEENFKALVLIAFAQYLQQCPFEDHVKLVNEVTEFAKTCVADESAENCDKSLHTLFGDKLCTVATLRETYGEMADCCAKQEPERNECFLQHKDDNPNLPRLVRPEVDVMCTAFHDNEETFLKKYLYEIARRHPYFYAPELLFFAKRYKAAFTECCQAADKAACLLPKLDELRDEGKASSAKQRLKCASLQKFGERAFKAWAVARLSQRFPKAEFAEVSKLVTDLTKVHTECCHGDLLECADDRADLAKYICENQDSISSKLKECCEKPLLEKSHCIAEVENDEMPADLPSLAADFVESKDVCKNYAEAKDVFLGMFLYEYARA

SEQ ID NO: 265 - DNA, 1590 bp, Artificial Sequence
  Description of Artificial Sequence: Synthetic polynucleotide
gaattcgcgaccatggccgtgatggctccccgaacactggtgctgctgctgtccggcgctctggctctgactcagacttgggctggctccgtggtgctgctgctgcggctggccaagacctatgagaccacactggaaaaatgctgtgccgctgcagatccacacgagtgctacgctaaggtgttcgacgagttcaagcctctggtcgaggaaccacagaacctgatcaagcagaattgtgagctgttcgaacagctgggcgagtataaatttcagaacgccctgctggtgagatacacaaagaaagtgccccaggtctctacacctactctggtggaagtcagtcgaaatctgggaaaggtcggctcaaagtgctgtaaacacccagaggcaaaacggatgccctgcgccgaagactatctgagcgtggtcctgaaccagctgtgtgtgctgcatgagaagacacccgtgtccgatagggtcaccaaatgctgtacagaatctctggtgaaccggagaccctgcttcagtgccctggaggtggacgaaacttacgtccctaaggagtttaatgccgaaaccttcacatttcacgctgatatctgtactctgtccgagaaagaacgccagattaagaaacagaccgccctggtggagctggtcaagcataaacctaaggcaactaaggaacagctgaaagccgtgatggacgatttcgccgcttttgtcgagaagtgctgtaaagctgacgataaggaaacctgcttcgcagaggaaggcaagaaactggtggcagcctctcaggctgcactgggactgggagggagcggggacatccagctgacacagtcccctgcatctctggccgtgagcctgggacagcgagctactatttcctgtaaggcatcccagtctgtggactatgatggggacagctatctgaactggtaccagcagatcccaggacagccccctaagctgctgatctacgatgccagcaatctggtgtccggcatcccaccccgattcagtggatcaggcagcgggacagattttactctgaacattcacccagtggagaaggtcgacgccgctacctaccattgccagcagtctactgaggacccctggaccttcggaggcgggacaaagctggaaatcaaaggaggcgggggatcaggcggaggaggcagcggaggaggagggtcccaggtgcagctgcagcagagcggagcagagctggtgagacctggcagctccgtcaagatttcttgtaaagctagtggctatgcattttctagttactggatgaattgggtgaagcagaggcctggacagggactggagtggatcggacagatttggccaggggatggagacaccaactataatgggaaattcaagggaaaagccactctgaccgctgacgagtcaagctccacagcctatatgcagctgtctagtctggcaagtgaggattcagccgtgtacttttgcgctaggcgcgaaactaccacagtcggcaggtactattacgctatggactactggggccaggggactaccgtgaccgtctcaagctgaggatcc

SEQ ID NO: 266 - protein, 527 aa, Artificial Sequence
  Description of Artificial Sequence: Synthetic polypeptide
EFATMAVMAPRTLVLLLSGALALTQTWAGSVVLLLRLAKTYETTLEKCCAAADPHECYAKVFDEFKPLVEEPQNLIKQNCELFEQLGEYKFQNALLVRYTKKVPQVSTPTLVEVSRNLGKVGSKCCKHPEAKRMPCAEDYLSVVLNQLCVLHEKTPVSDRVTKCCTESLVNRRPCFSALEVDETYVPKEFNAETFTFHADICTLSEKERQIKKQTALVELVKHKPKATKEQLKAVMDDFAAFVEKCCKADDKETCFAEEGKKLVAASQAALGLGGSGDIQLTQSPASLAVSLGQRATISCKASQSVDYDGDSYLNWYQQIPGQPPKLLIYDASNLVSGIPPRFSGSGSGTDFTLNIHPVEKVDAATYHCQQSTEDPWTFGGGTKLEIKGGGGSGGGGSGGGGSQVQLQQSGAELVRPGSSVKISCKASGYAFSSYWMNWVKQRPGQGLEWIGQIWPGDGDTNYNGKFKGKATLTADESSSTAYMQLSSLASEDSAVYFCARRETTTVGRYYYAMDYWGQGTTVTVSS

SEQ ID NO: 267 - DNA, 3351 bp, Artificial Sequence
  Description of Artificial Sequence: Synthetic polynucleotide
gaattcgcgaccatggccgtgatggcacctagaacactggtcctgctgctgagcggggcactggcactgacacagacttgggctggagacattaagctgcagcagagcggagctgagctggcacgaccaggagcaagtgtgaaaatgtcatgcaagacaagcggctatacttttaccaggtacactatgcactgggtgaagcagcgaccaggacagggactggagtggatcgggtacattaacccttccagaggatataccaactacaatcagaagttcaaagataaggccaccctgaccacagacaagagctcctctacagcctatatgcagctgagttcactgacttccgaggattctgccgtgtactattgcgctaggtactatgacgatcattattgtctggactactgggggcagggaactaccctgacagtgagctccgtcgagggagggagtggaggctcaggaggaagcggagggtccggaggagtggacgatatccagctgactcagtctcctgcaattatgtcagccagcccaggcgagaaggtcacaatgacttgccgcgcctctagttcagtgtcctatatgaattggtaccagcagaaatctggcaccagtcccaagagatggatctatgatacatccaaggtcgcctctggggtgccttacaggttttccggctctgggagtggaacttcatatagcctgaccattagctccatggaggctgaagacgccgctacctactattgccagcagtggtctagtaaccccctgacattcggcgccgggactaaactggagctgaaggggggatctgacgcacacaaaagtgaagtcgcccatcggttcaaggatctgggcgaggaaaattttaaagccctggtgctgatcgccttcgctcagtacctgcagcagtgcccttttgaggaccacgtgaagctggtcaacgaggtgaccgagttcgctaaaacatgcgtggctgatgagtctgcagaaaattgtgacaagagtctgcatacactgtttggggataaactgtgtaccgtggccacactgcgcgagacttacggagaaatggccgactgctgtgctaagcaggagcctgaacgaaacgagtgcttcctgcagcacaaagacgataaccctaatctgccacgcctggtgcgaccagaagtggatgtcatgtgtactgctttccacgacaatgaggaaacctttctgaagaaatatctgtacgagatcgcccggagacatccatatttttacgcacccgaactgctgttctttgccaaaagatacaaggcagccttcaccgagtgctgtcaggctgcagataaagccgcttgcctgctgcctaagctggatgagctgcgagacgaaggaaaggcctcaagcgctaaacagcggctgaagtgtgctagcctgcagaaattcggagagcgagccttcaaggcatgggcagtggctcggctgtctcagagattcccaaaggcagagtttgccgaagtcagcaaactggtgactgacctgaccaaggtgcacaccgagtgctgtcatggcgatctgctggaatgcgccgacgatagagctgacctggcaaagtacatctgtgagaaccaggatagcatttcctctaaactgaaggagtgctgtgaaaaacctctgctggagaagtcccactgcatcgccgaggtggaaaacgatgaaatgcccgctgacctgccttcactggcagccgatttcgtcgagagcaaagacgtgtgtaagaattacgcagaagccaaggatgtgttcctgggcatgtttctgtatgagtacgctaggcgacacccagactacagcgtggtcctgctgctgcggctggccaagacatatgagacaactctggaaaaatgctgtgctgcagccgaccctcatgagtgctatgccaaagtcttcgatgagttcaagcctctggtggaggaaccacagaacctgattaagcagaattgtgagctgtttgaacagctgggcgagtataaattccagaacgccctgctggtgagatacaccaagaaagtcccccaggtgtccacccctacactggtggaagtctctcggaatctgggaaaggtcggcagtaaatgctgtaagcacccagaggctaaaagaatgccctgcgcagaagattacctgtccgtggtcctgaaccagctgtgtgtgctgcatgagaagacaccagtctctgacagggtgaccaaatgctgtacagaatccctggtgaaccgacggccttgcttttctgccctggaggtcgatgaaacctatgtgccaaaggagttcaatgctgaaactttcacctttcacgcagacatctgtactctgagcgagaaagaacgccagattaagaaacagaccgccctggtcgagctggtgaaacataagcccaaagccacaaaagaacagctgaaggctgtcatggacgatttcgctgcatttgtggagaaatgctgtaaggcagacgataaggaaacctgcttcgccgaggaaggcaagaaactggtggccgctagccaggcagcactgggactgggagggtccggggatatccagctgacccagtcaccagccagcctggctgtctcactggggcagagggccacaattagttgtaaggcttcccagtctgtggactacgatggagactcctatctgaactggtaccagcagatcccaggacagccacctaaactgctgatctacgacgccagtaatctggtgtcaggcatcccaccccgctttagtggatcaggcagcgggacagacttcactctgaacattcacccagtcgagaaggtggatgctgcaacctaccattgccagcagagcactgaggacccctggacctttggaggcgggacaaaactggaaatcaagggaggcgggggatcaggcggaggaggcagcggaggaggagggtcccaggtgcagctgcagcagtccggagcagagctggtcaggccagggagttcagtgaaaattagctgtaaggcatccgggtatgccttcagctcctactggatgaattgggtcaaacagagacctggccagggcctggagtggatcggacagatttggcccggggatggagacactaactacaatgggaagtttaaaggaaaggctacactgactgcagatgaatctagttcaaccgcctacatgcagctgagctccctggcatccgaggactctgccgtctatttctgcgctagaagggaaaccacaactgtgggcaggtactattacgccatggactattggggccaggggaccacagtgaccgtctctagttgaggatcc

SEQ ID NO: 268 - protein, 1114 aa, Artificial Sequence
  Description of Artificial Sequence: Synthetic polypeptide
EFATMAVMAPRTLVLLLSGALALTQTWAGDIKLQQSGAELARPGASVKMSCKTSGYTFTRYTMHWVKQRPGQGLEWIGYINPSRGYTNYNQKFKDKATLTTDKSSSTAYMQLSSLTSEDSAVYYCARYYDDHYCLDYWGQGTTLTVSSVEGGSGGSGGSGGSGGVDDIQLTQSPAIMSASPGEKVTMTCRASSSVSYMNWYQQKSGTSPKRWIYDTSKVASGVPYRFSGSGSGTSYSLTISSMEAEDAATYYCQQWSSNPLTFGAGTKLELKGGSDAHKSEVAHRFKDLGEENFKALVLIAFAQYLQQCPFEDHVKLVNEVTEFAKTCVADESAENCDKSLHTLFGDKLCTVATLRETYGEMADCCAKQEPERNECFLQHKDDNPNLPRLVRPEVDVMCTAFHDNEETFLKKYLYEIARRHPYFYAPELLFFAKRYKAAFTECCQAADKAACLLPKLDELRDEGKASSAKQRLKCASLQKFGERAFKAWAVARLSQRFPKAEFAEVSKLVTDLTKVHTECCHGDLLECADDRADLAKYICENQDSISSKLKECCEKPLLEKSHCIAEVENDEMPADLPSLAADFVESKDVCKNYAEAKDVFLGMFLYEYARRHPDYSVVLLLRLAKTYETTLEKCCAAADPHECYAKVFDEFKPLVEEPQNLIKQNCELFEQLGEYKFQNALLVRYTKKVPQVSTPTLVEVSRNLGKVGSKCCKHPEAKRMPCAEDYLSVVLNQLCVLHEKTPVSDRVTKCCTESLVNRRPCFSALEVDETYVPKEFNAETFTFHADICTLSEKERQIKKQTALVELVKHKPKATKEQLKAVMDDFAAFVEKCCKADDKETCFAEEGKKLVAASQAALGLGGSGDIQLTQSPASLAVSLGQRATISCKASQSVDYDGDSYLNWYQQIPGQPPKLLIYDASNLVSGIPPRFSGSGSGTDFTLNIHPVEKVDAATYHCQQSTEDPWTFGGGTKLEIKGGGGSGGGGSGGGGSQVQLQQSGAELVRPGSSVKISCKASGYAFSSYWMNWVKQRPGQGLEWIGQIWPGDGDTNYNGKFKGKATLTADESSSTAYMQLSSLASEDSAVYFCARRETTTVGRYYYAMDYWGQGTTVTVSS

SEQ ID NO: 269 - protein, 337 aa, Artificial Sequence
  Description of Artificial Sequence: Synthetic polypeptide
DAHKSEVAHRFKDLGEENFKALVLIAFAQYLQQCPFEDHVKLVNEVTEFAKTCVADESAENCDKSLHTLFGDKLCTVATLRETYGEMADCCAKQEPERNECFLQHKDDNPNLPRLVRPEVDVMCTAFHDNEETFLKKYLYEIARRHPYFYAPELLFFAKRYKAAFTECCQAADKAACLLPKLDELRDEGKASSAKQRLKCASLQKFGERAFKAWAVARLSQRFPKAEFAEVSKLVTDLTKVHTECCHGDLLECADDRADLAKYICENQDSISSKLKECCEKPLLEKSHCIAEVENDEMPADLPSLAADFVESKDVCKNYAEAKDVFLGMFLYEYARA

SEQ ID NO: 270 - protein, 244 aa, Artificial Sequence
  Description of Artificial Sequence: Synthetic polypeptide
SVVLLLRLAKTYETTLEKCCAAADPHECYAKVFDEFKPLVEEPQNLIKQNCELFEQLGEYKFQNALLVRYTKKVPQVSTPTLVEVSRNLGKVGSKCCKHPEAKRMPCAEDYLSVVLNQLCVLHEKTPVSDRVTKCCTESLVNRRPCFSALEVDETYVPKEFNAETFTFHADICTLSEKERQIKKQTALVELVKHKPKATKEQLKAVMDDFAAFVEKCCKADDKETCFAEEGKKLVAASQAALGL

SEQ ID NO: 271 - protein, 609 aa, Homo sapiens [sequence omitted]

SEQ ID NO: 272 - protein, 29 aa, Artificial Sequence
  Description of Artificial Sequence: Synthetic peptide
TCCCKSSCLRLITSHLKASQPTMRIRERK

SEQ ID NO: 273 - protein, 422 aa, Artificial Sequence
  Description of Artificial Sequence: Synthetic polypeptide
  misc_feature (1)..(420): This region may encompass 0 to 20 "Gly Gly Gly Gly Gly Gly Gly Gly Gly Gly Gly Gly Gly Gly Gly Gly Gly Gly Gly Gly Ser" repeating units or embodiments thereof, wherein some residues may be absent
  misc_feature (1)..(20): This region may encompass 0 to 20 Gly residues, wherein some residues may be absent
  misc_feature (22)..(41): This region may encompass 0 to 20 Gly residues, wherein some residues may be absent
  misc_feature (43)..(62): This region may encompass 0 to 20 Gly residues, wherein some residues may be absent
  misc_feature (64)..(83): This region may encompass 0 to 20 Gly residues, wherein some residues may be absent
  misc_feature (85)..(104): This region may encompass 0 to 20 Gly residues, wherein some residues may be absent
  misc_feature (106)..(125): This region may encompass 0 to 20 Gly residues, wherein some residues may be absent
  misc_feature (127)..(146): This region may encompass 0 to 20 Gly residues, wherein some residues may be absent
  misc_feature (148)..(167): This region may encompass 0 to 20 Gly residues, wherein some residues may be absent
  misc_feature (169)..(188): This region may encompass 0 to 20 Gly residues, wherein some residues may be absent
  misc_feature (190)..(209): This region may encompass 0 to 20 Gly residues, wherein some residues may be absent
  misc_feature (211)..(230): This region may encompass 0 to 20 Gly residues, wherein some residues may be absent
  misc_feature (232)..(251): This region may encompass 0 to 20 Gly residues, wherein some residues may be absent
  misc_feature (253)..(272): This region may encompass 0 to 20 Gly residues, wherein some residues may be absent
  misc_feature (274)..(293): This region may encompass 0 to 20 Gly residues, wherein some residues may be absent
  misc_feature (295)..(314): This region may encompass 0 to 20 Gly residues, wherein some residues may be absent
  misc_feature (316)..(335): This region may encompass 0 to 20 Gly residues, wherein some residues may be absent
  misc_feature (337)..(356): This region may encompass 0 to 20 Gly residues, wherein some residues may be absent
  misc_feature (358)..(377): This region may encompass 0 to 20 Gly residues, wherein some residues may be absent
  misc_feature (379)..(398): This region may encompass 0 to 20 Gly residues, wherein some residues may be absent
  misc_feature (400)..(419): This region may encompass 0 to 20 Gly residues, wherein some residues may be absent
GGGGGGGGGGGGGGGGGGGGSGGGGGGGGGGGGGGGGGGGGSGGGGGGGGGGGGGGGGGGGGSGGGGGGGGGGGGGGGGGGGGSGGGGGGGGGGGGGGGGGGGGSGGGGGGGGGGGGGGGGGGGGSGGGGGGGGGGGGGGGGGGGGSGGGGGGGGGGGGGGGGGGGGSGGGGGGGGGGGGGGGGGGGGSGGGGGGGGGGGGGGGGGGGGSGGGGGGGGGGGGGGGGGGGGSGGGGGGGGGGGGGGGGGGGGSGGGGGGGGGGGGGGGGGGGGSGGGGGGGGGGGGGGGGGGGGSGGGGGGGGGGGGGGGGGGGGSGGGGGGGGGGGGGGGGGGGGSGGGGGGGGGGGGGGGGGGGGSGGGGGGGGGGGGGGGGGGGGSGGGGGGGGGGGGGGGGGGGGSGGGGGGGGGGGGGGGGGGGGSGG

SEQ ID NO: 274 - protein, 420 aa, Artificial Sequence
  Description of Artificial Sequence: Synthetic polypeptide
  misc_feature (1)..(420): This sequence may encompass 0 to 20 "Ser Gly Gly Gly Gly Gly Gly Gly Gly Gly Gly Gly Gly Gly Gly Gly Gly Gly Gly Gly Gly" repeating units or embodiments thereof, wherein some residues may be absent
  misc_feature (2)..(21): This region may encompass 0 to 20 Gly residues, wherein some residues may be absent
  misc_feature (23)..(42): This region may encompass 0 to 20 Gly residues, wherein some residues may be absent
  misc_feature (44)..(63): This region may encompass 0 to 20 Gly residues, wherein some residues may be absent
  misc_feature (65)..(84): This region may encompass 0 to 20 Gly residues, wherein some residues may be absent
  misc_feature (86)..(105): This region may encompass 0 to 20 Gly residues, wherein some residues may be absent
  misc_feature (107)..(126): This region may encompass 0 to 20 Gly residues, wherein some residues may be absent
  misc_feature (128)..(147): This region may encompass 0 to 20 Gly residues, wherein some residues may be absent
  misc_feature (149)..(168): This region may encompass 0 to 20 Gly residues, wherein some residues may be absent
  misc_feature (170)..(189): This region may encompass 0 to 20 Gly residues, wherein some residues may be absent
  misc_feature (191)..(210): This region may encompass 0 to 20 Gly residues, wherein some residues may be absent
  misc_feature (212)..(231): This region may encompass 0 to 20 Gly residues, wherein some residues may be absent
  misc_feature (233)..(252): This region may encompass 0 to 20 Gly residues, wherein some residues may be absent
  misc_feature (254)..(273): This region may encompass 0 to 20 Gly residues, wherein some residues may be absent
  misc_feature (275)..(294): This region may encompass 0 to 20 Gly residues, wherein some residues may be absent
  misc_feature (296)..(315): This region may encompass 0 to 20 Gly residues, wherein some residues may be absent
  misc_feature (317)..(336): This region may encompass 0 to 20 Gly residues, wherein some residues may be absent
  misc_feature (338)..(357): This region may encompass 0 to 20 Gly residues, wherein some residues may be absent
  misc_feature (359)..(378): This region may encompass 0 to 20 Gly residues, wherein some residues may be absent
  misc_feature (380)..(399): This region may encompass 0 to 20 Gly residues, wherein some residues may be absent
  misc_feature (401)..(420): This region may encompass 0 to 20 Gly residues, wherein some residues may be absent
SGGGGGGGGGGGGGGGGGGGGSGGGGGGGGGGGGGGGGGGGGSGGGGGGGGGGGGGGGGGGGGSGGGGGGGGGGGGGGGGGGGGSGGGGGGGGGGGGGGGGGGGGSGGGGGGGGGGGGGGGGGGGGSGGGGGGGGGGGGGGGGGGGGSGGGGGGGGGGGGGGGGGGGGSGGGGGGGGGGGGGGGGGGGGSGGGGGGGGGGGGGGGGGGGGSGGGGGGGGGGGGGGGGGGGGSGGGGGGGGGGGGGGGGGGGGSGGGGGGGGGGGGGGGGGGGGSGGGGGGGGGGGGGGGGGGGGSGGGGGGGGGGGGGGGGGGGGSGGGGGGGGGGGGGGGGGGGGSGGGGGGGGGGGGGGGGGGGGSGGGGGGGGGGGGGGGGGGGGSGGGGGGGGGGGGGGGGGGGGSGGGGGGGGGGGGGGGGGGGG

SEQ ID NO: 275 - protein, 440 aa, Artificial Sequence
  Description of Artificial Sequence: Synthetic polypeptide
  misc_feature (1)..(440): This sequence may encompass 0 to 20 "Ser Glu Gly Gly Gly Gly Gly Gly Gly Gly Gly Gly Gly Gly Gly Gly Gly Gly Gly Gly Gly Gly" repeating units or embodiments thereof, wherein some residues may be absent
  misc_feature (3)..(22): This region may encompass 0 to 20 Gly residues, wherein some residues may be absent
  misc_feature (25)..(44): This region may encompass 0 to 20 Gly residues, wherein some residues may be absent
  misc_feature (47)..(66): This region may encompass 0 to 20 Gly residues, wherein some residues may be absent
  misc_feature (69)..(88): This region may encompass 0 to 20 Gly residues, wherein some residues may be absent
  misc_feature (91)..(110): This region may encompass 0 to 20 Gly residues, wherein some residues may be absent
  misc_feature (113)..(132): This region may encompass 0 to 20 Gly residues, wherein some residues may be absent
  misc_feature (135)..(154): This region may encompass 0 to 20 Gly residues, wherein some residues may be absent
  misc_feature (157)..(176): This region may encompass 0 to 20 Gly residues, wherein some residues may be absent
  misc_feature (179)..(198): This region may encompass 0 to 20 Gly residues, wherein some residues may be absent
  misc_feature (201)..(220): This region may encompass 0 to 20 Gly residues, wherein some residues may be absent
  misc_feature (223)..(242): This region may encompass 0 to 20 Gly residues, wherein some residues may be absent
  misc_feature (245)..(264): This region may encompass 0 to 20 Gly residues, wherein some residues may be absent
  misc_feature (267)..(286): This region may encompass 0 to 20 Gly residues, wherein some residues may be absent
  misc_feature (289)..(308): This region may encompass 0 to 20 Gly residues, wherein some residues may be absent
  misc_feature (311)..(330): This region may encompass 0 to 20 Gly residues, wherein some residues may be absent
  misc_feature (333)..(352): This region may encompass 0 to 20 Gly residues, wherein some residues may be absent
  misc_feature (355)..(374): This region may encompass 0 to 20 Gly residues, wherein some residues may be absent
  misc_feature (377)..(396): This region may encompass 0 to 20 Gly residues, wherein some residues may be absent
  misc_feature (399)..(418): This region may encompass 0 to 20 Gly residues, wherein some residues may be absent
  misc_feature (421)..(440): This region may encompass 0 to 20 Gly residues, wherein some residues may be absent
SEGGGGGGGGGGGGGGGGGGGGSEGGGGGGGGGGGGGGGGGGGGSEGGGGGGGGGGGGGGGGGGGGSEGGGGGGGGGGGGGGGGGGGGSEGGGGGGGGGGGGGGGGGGGGSEGGGGGGGGGGGGGGGGGGGGSEGGGGGGGGGGGGGGGGGGGGSEGGGGGGGGGGGGGGGGGGGGSEGGGGGGGGGGGGGGGGGGGGSEGGGGGGGGGGGGGGGGGGGGSEGGGGGGGGGGGGGGGGGGGGSEGGGGGGGGGGGGGGGGGGGGSEGGGGGGGGGGGGGGGGGGGGSEGGGGGGGGGGGGGGGGGGGGSEGGGGGGGGGGGGGGGGGGGGSEGGGGGGGGGGGGGGGGGGGGSEGGGGGGGGGGGGGGGGGGGGSEGGGGGGGGGGGGGGGGGGGGSEGGGGGGGGGGGGGGGGGGGGSEGGGGGGGGGGGGGGGGGGGG

SEQ ID NO: 276 - protein, 17 aa, Unknown
  Description of Unknown: Stanniocalcin signal peptide
MLQNSAVLLLLVISASA

SEQ ID NO: 277 - protein, 22 aa, Artificial Sequence
  Description of Artificial Sequence: Synthetic consensus signal peptide
MPTWAWWLFLVLLLALWAPARG

SEQ ID NO: 278 - protein, 4 aa, Artificial Sequence
  Description of Artificial Sequence: Synthetic peptide
GGGS

SEQ ID NO: 279 - protein, 18 aa, Artificial Sequence
  Description of Artificial Sequence: Synthetic peptide
GGSGGGSGGGSGGGSGGG

SEQ ID NO: 280 - protein, 4 aa, Artificial Sequence
  Description of Artificial Sequence: Synthetic peptide
GGSG

SEQ ID NO: 281 - protein, 15 aa, Artificial Sequence
  Description of Artificial Sequence: Synthetic peptide
GGGGSGGGGSGGGGS

SEQ ID NO: 282 - protein, 4 aa, Artificial Sequence
  Description of Artificial Sequence: Synthetic peptide
AAAL
